(19) United States
(12) Patent Application Publication
(10) Pub. No.: US 2023/0173106 A1
(43) Pub. Date: Jun. 8, 2023

(54) GUIDE RNA THAT TARGETS A MUTANT HUMAN GUANYLATE CYCLASE 2A ALLELE

(71) Applicant: EmendoBio Inc., Wilmington, DE (US)

(72) Inventors: Lior Izhar, Tel Aviv (IL); David Baram, Nir Zvi (IL); Joe Georgeson, Rehevot (IL); Michal Golan-Mashiach, Ness-Ziona (IL); Asael Herman, Ness-Ziona (IL); Rafi Emmanuel, Ramla (IL)

(73) Assignee: EmendoBio Inc., Wilmington, DE (US)

(21) Appl. No.: 16/203,004

(22) Filed: Nov. 28, 2018

Related U.S. Application Data
(60) Provisional application No. 62/680,479, filed on Jun. 4, 2018.
(60) Provisional application No. 62/591,333, filed on Nov. 28, 2017.

(51) Int. Cl. A61K 48/00; C12N 9/22; A61P 27/00

(52) U.S. Cl. CPC A61K 48/0066; C12N 9/22; A61P 27/00; C12Y 301/00

(57) ABSTRACT

RNA molecules comprising a guide sequence portion having 17-20 nucleotides in the sequence of 17-20 contiguous nucleotides set forth in any one of SEQ ID NOs: 1-3010 and compositions, methods, and uses thereof.

[0001] This application claims the benefit of U.S. Provisional Application No. 62/680,479, filed Jun. 4, 2018 and U.S. Provisional Application No. 62/591,333, filed Nov. 28, 2017, the contents of each of which are hereby incorporated by reference.

[0002] Throughout this application, various publications are referenced, including referenced in parenthesis. The disclosures of all publications mentioned in this application in their entireties are hereby incorporated by reference into this application in order to provide additional description of the art to which this invention pertains and of the features in the art which can be employed with this invention.

### REFERENCE TO SEQUENCE LISTING

[0003] This application incorporates-by-reference nucleotide sequences which are present in the filed named “181128_90237-A_Sequence_Listing_ADR.txt”, which is 551 kilobytes in size, and which was created on Nov. 27, 2018 in the IBM-PC machine format, having an operating system compatibility with MS-Windows, which is contained in the text file filed Nov. 28, 2018 as part of this application.

### BACKGROUND OF INVENTION

[0004] There are several classes of DNA variation in the human genome, including insertions and deletions, differences in the copy number of repeated sequences, and single nucleotide polymorphisms (SNPs). A SNP is a DNA sequence variation occurring when a single nucleotide (adenine (A), thymine (T), cytosine (C), or guanine (G)) in the genome differs between human subjects or paired chromosomes in an individual. Over the years, the different types of DNA variations have been the focus of the research community either as markers in studies to pinpoint traits or disease causation or as potential causes of genetic disorders.

[0005] A genetic disorder is caused by one or more abnormalities in the genome. Genetic disorders may be regarded as either “dominant” or “recessive.” Recessive genetic disorders are those which require two copies (i.e., two alleles) of the abnormal/defective gene to be present. In contrast, a dominant genetic disorder involves a gene or genes which exhibit(s) dominance over a normal (functional/healthy) gene or genes. As such, in dominant genetic disorders only a single copy (i.e., allele) of an abnormal gene is required to cause or contribute to the symptoms of a particular genetic disorder. Such mutations include, for example, gain-of-function mutations in which the altered gene product possesses a new molecular function or a new pattern of gene expression. Other examples include dominant negative mutations, which have a gene product that acts antagonistically to the wild-type allele.

### Cone Rod Dystrophy

[0006] The cone-rod dystrophies (CORD) are a heterogeneous group of progressive genetically determined retinal disorders, which may be inherited as an autosomal dominant, autosomal recessive, or X-linked trait. Typically, they are characterized clinically by a loss of visual acuity, abnormal color vision, photophobia, and visual field loss and may develop macular atrophy. Mutations in the gene ‘Guanylate cyclase 2D, membrane (retina-specific)’ (GUCY2D) have been demonstrated to be associated with an autosomal dominant CORD.

### SUMMARY OF THE INVENTION

[0007] Disclosed is an approach for knocking out the expression of a dominant-mutated allele by disrupting the dominant-mutated allele or degrading the resulting mRNA.

[0008] The present disclosure provides a method for utilizing at least one naturally occurring nucleotide difference or polymorphism (e.g., single nucleotide polymorphism (SNP)) for distinguishing/discriminating between two alleles of a gene, one allele bearing a mutation such that it encodes a mutated protein causing a disease phenotype (“mutated allele”), and the other allele encoding for a functional protein (“functional allele”). In some embodiments, the method further comprises the step of knocking out expression of the mutated protein and allowing expression of the functional protein.

[0009] According to embodiments of the present invention, there is provided a first RNA molecule comprising a guide sequence portion having 17-20 nucleotides in the sequence of 17-20 contiguous nucleotides set forth in any one of SEQ ID NOs: 1-3010.

[0010] According to embodiments of the present invention, there is provided a first RNA molecule comprising a guide sequence portion having 17-20 contiguous nucleotides set forth in any one of SEQ ID NOs: 1-3010.

[0011] According to some embodiments of the present invention, there is provided a composition comprising an RNA molecule comprising a guide sequence portion having 17-20 nucleotides in the sequence of 17-20 contiguous nucleotides set forth in any one of SEQ ID NOs: 1-3010 and a CRISPR nuclease.

[0012] According to some embodiments of the present invention, there is provided a method for inactivating a mutant GUCY2D allele in a cell, the method comprising delivering to the cell a composition comprising an RNA molecule comprising a guide sequence portion having 17-20 nucleotides in the sequence of 17-20 contiguous nucleotides set forth in any one of SEQ ID NOs: 1-3010 and a CRISPR nuclease.

[0013] According to some embodiments of the present invention, there is provided a method for treating CORD, the method comprising delivering to a subject having CORD a composition comprising an RNA molecule comprising a guide sequence portion having 17-20 nucleotides in the sequence of 17-20 contiguous nucleotides set forth in any one of SEQ ID NOs: 1-3010 and a CRISPR nuclease.

[0014] According to some embodiments of the present invention, there is provided use of a composition comprising an RNA molecule comprising a guide sequence portion having 17-20 nucleotides in the sequence of 17-20 contiguous nucleotides set forth in any one of SEQ ID NOs: 1-3010 and a CRISPR nuclease for inactivating a mutant GUCY2D allele in a cell, comprising delivering to the cell the composition comprising an RNA molecule comprising a guide sequence portion having 17-20 nucleotides in the sequence of 17-20 contiguous nucleotides set forth in any one of SEQ ID NOs: 1-3010 and a CRISPR nuclease.

[0015] According to embodiments of the present invention, there is provided a medicament comprising an RNA molecule comprising a guide sequence portion having 17-20 nucleotides in the sequence of 17-20 contiguous nucleotides set forth in any one of SEQ ID NOs: 1-3010 and a CRISPR nuclease for use in inactivating a mutant GUCY2D allele in a cell, wherein the medicament is administered by delivering to the cell the composition comprising an RNA molecule comprising a guide sequence portion having 17-20 nucleotides in the sequence of 17-20 contiguous nucleotides set forth in any one of SEQ ID NOs: 1-3010 and a CRISPR nuclease.

[0016] According to some embodiments of the present invention, there is provided use of a composition comprising an RNA molecule comprising a guide sequence portion having 17-20 nucleotides in the sequence of 17-20 contiguous nucleotides set forth in any one of SEQ ID NOs: 1-3010 and a CRISPR nuclease for treating ameliorating or preventing CORD, comprising delivering to a subject having or at risk of having CORD the composition of comprising an RNA molecule comprising a guide sequence portion having 17-20 nucleotides in the sequence of 17-20 contiguous nucleotides set forth in any one of SEQ ID NOs: 1-3010 and a CRISPR nuclease.

[0017] According to some embodiments of the present invention, there is provided a medicament comprising the composition comprising an RNA molecule comprising a guide sequence portion having 17-20 nucleotides in the sequence of 17-20 contiguous nucleotides set forth in any one of SEQ ID NOs: 1-3010 and a CRISPR nuclease for use in treating ameliorating or preventing CORD, wherein the medicament is administered by delivering to a subject having or at risk of having CORD the composition comprising an RNA molecule comprising a guide sequence portion having 17-20 nucleotides in the sequence of 17-20 contiguous nucleotides set forth in any one of SEQ ID NOs: 1-3010 and a CRISPR nuclease.

[0018] According to some embodiments of the present invention, there is provided a kit for inactivating a mutant GUCY2D allele in a cell, comprising an RNA molecule comprising a guide sequence portion having 17-20 nucleotides in the sequence of 17-20 contiguous nucleotides set forth in any one of SEQ ID NOs: 1-3010, a CRISPR nuclease, and/or a tracrRNA molecule; and instructions for delivering the RNA molecule; CRISPR nuclease, and/or the tracrRNA to the cell.

[0019] According to some embodiments of the present invention, there is provided a kit for treating CORD in a subject, comprising an RNA molecule comprising a guide sequence portion having 17-20 nucleotides in the sequence of 17-20 contiguous nucleotides set forth in any one of SEQ ID NOs: 1-3010, a CRISPR nuclease, and/or a tracrRNA molecule; and instructions for delivering the RNA molecule; CRISPR nuclease, and/or the tracrRNA to a subject having or at risk of having CORD.

### DETAILED DESCRIPTION

### Definitions

[0020] Unless otherwise defined, all technical and/or scientific terms used herein have the same meaning as commonly understood by one of ordinary skill in the art to which the invention pertains. Although methods and materials similar or equivalent to those described herein can be used in the practice or testing of embodiments of the invention, exemplary methods and/or materials are described below. In case of conflict, the patent specification, including definitions, will control. In addition, the materials, methods, and examples are illustrative only and are not intended to be necessarily limiting.

[0021] It should be understood that the terms “a” and “an” as used above and elsewhere herein refer to “one or more” of the enumerated components. It will be clear to one of ordinary skill in the art that the use of the singular includes the plural unless specifically stated otherwise. Therefore, the terms “a,” “an” and “at least one” are used interchangeably in this application.

[0022] For purposes of better understanding the present teachings and in no way limiting the scope of the teachings, unless otherwise indicated, all numbers expressing quantities, percentages or proportions, and other numerical values used in the specification and claims, are to be understood as being modified in all instances by the term “about.” Accordingly, unless indicated to the contrary, the numerical parameters set forth in the following specification and attached claims are approximations that may vary depending upon the desired properties sought to be obtained. At the very least, each numerical parameter should at least be construed in light of the number of reported significant digits and by applying ordinary rounding techniques.

[0023] Unless otherwise stated, adjectives such as “substantially” and “about” modifying a condition or relationship characteristic of a feature or features of an embodiment of the invention, are understood to mean that the condition or characteristic is defined to within tolerances that are acceptable for operation of the embodiment for an application for which it is intended. Unless otherwise indicated, the word “or” in the specification and claims is considered to be the inclusive “or” rather than the exclusive or, and indicates at least one of, or any combination of items it conjoins.

[0024] In the description and claims of the present application, each of the verbs, “comprise,” “include” and “have” and conjugates thereof, are used to indicate that the object or objects of the verb are not necessarily a complete listing of components, elements or parts of the subject or subjects of the verb. Other terms as used herein are meant to be defined by their well-known meanings in the art.

[0025] The “guide sequence portion” of an RNA molecule refers to a nucleotide sequence that is capable of hybridizing to a specific target DNA sequence, e.g., the guide sequence portion has a nucleotide sequence which is fully complementary to said target DNA sequence. In some embodiments, the guide sequence portion is 17, 18, 19, 20, 21, 22, 23, or 24 nucleotides in length, or approximately 17-24, 18-22, 19-22, 18-20, or 17-20 nucleotides in length. The guide sequence portion may be part of an RNA molecule that can form a complex with a CRISPR nuclease with the guide sequence portion serving as the DNA targeting portion of the CRISPR complex. When the DNA molecule having the guide sequence portion is present contemporaneously with the CRISPR molecule the RNA molecule is capable of targeting the CRISPR nuclease to the specific target DNA sequence. Each possibility represents a separate embodiment. An RNA molecule can be custom designed to target any desired sequence.

[0026] In embodiments of the present invention, an RNA molecule comprises a guide sequence portion having 17-20 nucleotides in the sequence of 17-20 contiguous nucleotides set forth in any one of SEQ ID NOs: 1-3010, 1-742, or 743-3010.

[0027] As used herein, “contiguous nucleotides” set forth in a SEQ ID NO refers to nucleotides in a sequence of nucleotides in the order set forth in the SEQ ID NO without any intervening nucleotides.

[0028] In embodiments of the present invention, the guide sequence portion may be 20 nucleotides in length and consists of 20 nucleotides in the sequence of 20 contiguous nucleotides set forth in any one of SEQ ID NOs: 1-3010. In embodiments of the present invention, the guide sequence portion may be less than 20 nucleotides in length. For example, in embodiments of the present invention the guide sequence portion may be 17, 18, or 19 nucleotides in length. In such embodiments the guide sequence portion may consist of 17, 18, or 19 nucleotides, respectively, in the sequence of 17-20 contiguous nucleotides set forth in any one of SEQ ID NOs: 1-3010. For example, a guide sequence portion having 17 nucleotides in the sequence of 17 contiguous nucleotides set forth in SEQ ID NO: 1 may consist of any one of the following nucleotide sequences (nucleotides excluded from the contiguous sequence are marked in strike-through):

SEQ ID NO: 1
UGUGCUUCUCCUUAGGGUCU
17 nucleotide guide sequence 1: [symbol]
GCUUCUCCUUAGGGUCU
17 nucleotide guide sequence 2: [symbol]
UGCUUCUCCUUAGGGUC [symbol]
17 nucleotide guide sequence 3: [symbol]
GUGCUUCUCCUUAGGGU [symbol]
17 nucleotide guide sequence 4:
UGUGCUUCUCCUUAGGG

[symbol]

[0029] In embodiments of the present invention, the guide sequence portion may be greater than 20 nucleotides in length. For example, in embodiments of the present invention the guide sequence portion may be 21, 22, 23, or 24 nucleotides in length. In such embodiments the guide sequence portion comprises 20 nucleotides in the sequence of 20 contiguous nucleotides set forth in any one of SEQ ID NOs: 1-3010 and additional nucleotides fully complimentary to a nucleotide or sequence of nucleotides adjacent to the 3′ end of the target sequence, 5′ end of the target sequence, or both.

[0030] In embodiments of the present invention a CRISPR nuclease and an RNA molecule comprising a guide sequence portion form a CRISPR complex that binds to a target DNA sequence to effect cleavage of the target DNA sequence. CRISPR nucleases, e.g. Cpf1, may form a CRISPR complex comprising a CRISPR nuclease and RNA molecule without a further tracrRNA molecule. Alternatively, CRISPR nucleases, e.g. Cas9, may form a CRISPR complex between the CRISPR nuclease, an RNA molecule, and a tracrRNA molecule.

[0031] In embodiments of the present invention, the RNA molecule may further comprise the sequence of a tracrRNA molecule. Such embodiments may be designed as a synthetic fusion of the guide portion of the RNA molecule and the trans-activating crRNA (tracrRNA). (See Jinek (2012) Science). Embodiments of the present invention may also form CRISPR complexes utilizing a separate tracrRNA molecule and a separate RNA molecule comprising a guide sequence portion. In such embodiments the tracrRNA molecule may hybridize with the RNA molecule via basepairing and may be advantageous in certain applications of the invention described herein.

[0032] The term “tracr mate sequence” refers to a sequence sufficiently complementary to a tracrRNA molecule so as to hybridize to the tracrRNA via basepairing and promote the formation of a CRISPR complex. (See e.g., U.S. Pat. No. 8,906,616). In embodiments of the present invention, the RNA molecule may further comprise a portion having a tracr mate sequence.

[0033] A “gene,” for the purposes of the present disclosure, includes a DNA region encoding a gene product, as well as all DNA regions which regulate the production of the gene product, whether or not such regulatory sequences are adjacent to coding and/or transcribed sequences. Accordingly, a gene includes, but is not necessarily limited to, promoter sequences, terminators, translational regulatory sequences such as ribosome binding sites and internal ribosome entry sites, enhancers, silencers, insulators, boundary elements, replication origins, matrix attachment sites and locus control regions.

[0034] “Eukaryotic” cells include, but are not limited to, fungal cells (such as yeast), plant cells, animal cells, mammalian cells and human cells.

[0035] The term “nuclease” as used herein refers to an enzyme capable of cleaving the phosphodiester bonds between the nucleotide subunits of nucleic acid. A nuclease may be isolated or derived from a natural source. The natural source may be any living organism. Alternatively, a nuclease may be a modified or a synthetic protein which retains the phosphodiester bond cleaving activity. Gene modification can be achieved using a nuclease, for example a CRISPR nuclease.

### Embodiments

[0036] The present disclosure provides a method for utilizing at least one naturally occurring nucleotide difference or polymorphism (e.g., single nucleotide polymorphism (SNP)) for distinguishing/discriminating between two alleles of a gene, one allele bearing a mutation such that it encodes a mutated protein causing a disease phenotype (“mutated allele”), and the other allele encoding for a functional protein (“functional allele”). The method further comprises the step of knocking out expression of the mutated protein and allowing expression of the functional protein. In some embodiments, the method is for treating, ameliorating, or preventing a dominant negative genetic disorder.

[0037] According to embodiments of the present invention, there is provided a first RNA molecule comprising a guide sequence portion having 17-20 nucleotides in the sequence of 17-20 contiguous nucleotides set forth in any one of SEQ ID NOs: 1-3010.

[0038] According to embodiments of the present invention, there is provided a first RNA molecule comprising a guide sequence portion having 17-20 contiguous nucleotides set forth in any one of SEQ ID NOs: 1-3010.

[0039] According embodiments of the present invention, an RNA molecule may further comprise a portion having a sequence which binds to a CRISPR nuclease.

[0040] According to embodiments of the present invention, the sequence which binds to a CRISPR nuclease is a tracrRNA sequence.

[0041] According to embodiments of the present invention, an RNA molecule may further comprise a portion having a tracr mate sequence.

[0042] According to embodiments of the present invention, an RNA molecule may further comprise one or more linker portions.

[0043] According to embodiments of the present invention, an RNA molecule may be up to 300, 290, 280, 270, 260, 250, 240, 230, 220, 210, 200, 190, 180, 170, 160, 150, 140, 130, 120, 110, or 100 nucleotides in length. Each possibility represents a separate embodiment. In embodiments of the present invention, the RNA molecule may be 17 up to 300 nucleotides in length, 100 up to 300 nucleotides in length, 150 up to 300 nucleotides in length, 200 up to 300 nucleotides in length, 100 to 200 nucleotides in length, or 150 up to 250 nucleotides in length. Each possibility represents a separate embodiment.

[0044] According to some embodiments of the present invention, there is provided a composition comprising an RNA molecule comprising a guide sequence portion having 17-20 nucleotides in the sequence of 17-20 contiguous nucleotides set forth in any one of SEQ ID NOs: 1-3010 and a CRISPR nuclease.

[0045] According to embodiments of the present invention, the composition may comprise a second RNA molecule comprising a guide sequence portion.

[0046] According to embodiments of the present invention, the guide sequence portion of the second RNA molecule comprises 17-20 nucleotides in the sequence of 17-20 contiguous nucleotides set forth in any one of SEQ ID NOs: 1-3010.

[0047] According to embodiments of the present invention, the 17-20 nucleotides of the guide sequence portion of the second RNA molecule are in a different sequence from the sequence of the guide sequence portion of the first RNA molecule

[0048] Embodiments of the present invention may comprise a tracrRNA molecule.

[0049] According to some embodiments of the present invention, there is provided a method for inactivating a mutant GUCY2D allele in a cell, the method comprising delivering to the cell a composition comprising an RNA molecule comprising a guide sequence portion having 17-20 nucleotides in the sequence of 17-20 contiguous nucleotides set forth in any one of SEQ ID NOs: 1-3010 and a CRISPR nuclease.

[0050] According to some embodiments of the present invention, there is provided a method for treating CORD, the method comprising delivering to a subject having CORD a composition comprising an RNA molecule comprising a guide sequence portion having 17-20 nucleotides in the sequence of 17-20 contiguous nucleotides set forth in any one of SEQ ID NOs: 1-3010 and a CRISPR nuclease.

[0051] According to embodiments of the present invention, the composition comprises a second RNA molecule comprising a guide sequence portion having 17-20 nucleotides in the sequence of 17-20 contiguous nucleotides set forth in any one of SEQ ID NOs: 1-3010.

[0052] According to embodiments of the present invention, the 17-20 nucleotides of the guide sequence portion of the second RNA molecule are in a different sequence from the sequence of the guide sequence portion of the first RNA molecule

[0053] According to embodiments of the present invention, the CRISPR nuclease and the RNA molecule or RNA molecules are delivered to the subject and/or cells substantially at the same time or at different times.

[0054] According to embodiments of the present invention, the tracrRNA is delivered to the subject and/or cells substantially at the same time or at different times as the CRISPR nuclease and RNA molecule or RNA molecules.

[0055] According to embodiments of the present invention, the first RNA molecule targets a SNP or disease-causing mutation in an exon or promoter of a mutated allele, and wherein the second RNA molecule targets a SNP in the same or a different exon of the mutated allele, a SNP in an intron, or a sequence in an intron present in both the mutated or functional allele.

[0056] According to embodiments of the present invention, the first RNA molecule or the first and the second RNA molecules target a SNP in the promoter region, the start codon, or the untranslated region (UTR) of a mutated allele.

[0057] According to embodiments of the present invention, the first RNA molecule or the first and the second RNA molecules targets at least a portion of the promoter and/or the start codon and/or a portion of the UTR of a mutated allele.

[0058] According to embodiments of the present invention, the first RNA molecule targets a portion of the promoter, a first SNP in the promoter, or a SNP upstream to the promoter of a mutated allele and the second RNA molecule is targets a second SNP, which is downstream of the first SNP, and is in the promoter, in the UTR, or in an intron or in an exon of a mutated allele.

[0059] According to embodiments of the present invention, the first RNA molecule targets a SNP in the promoter, upstream of the promoter, or the UTR of a mutated allele and the second RNA molecule is designed to target a sequence which is present in an intron of both the mutated allele and the functional allele.

[0060] According to embodiments of the present invention, the first RNA molecule targets a sequence upstream of the promotor which is present in both a mutated and functional allele and the second RNA molecule targets a SNP or disease-causing mutation in any location of the gene.

[0061] According to embodiments of the present invention, there is provided a method comprising removing an exon containing a disease-causing mutation from a mutated allele, wherein the first RNA molecule or the first and the second RNA molecules target regions flanking an entire exon or a portion of the exon.

[0062] According to embodiments of the present invention, there is provided a method comprising removing multiple exons, the entire open reading frame of a gene, or removing the entire gene.

[0063] According to embodiments of the present invention, the first RNA molecule targets a SNP or disease-causing mutation in an exon or promoter of a mutated allele, and wherein the second RNA molecule targets a SNP in the same or a different exon of the mutated allele, a SNP in an intron, or a sequence in an intron present in both the mutated or functional allele.

[0064] According to embodiments of the present invention, the first RNA molecule or the first and the second RNA molecules target an alternative splicing signal sequence between an exon and an intron of a mutant allele.

[0065] According to embodiments of the present invention, the second RNA molecule targets a sequence present in both a mutated allele and a functional allele. According to embodiments of the present invention, the second RNA molecule targets an intron.

[0066] According to embodiments of the present invention, there is provided a method comprising subjecting the mutant allele to insertion or deletion by an error prone non-homologous end joining (NHEJ) mechanism, generating a frameshift in the mutated allele's sequence.

[0067] According to embodiments of the present invention, the frameshift results in inactivation or knockout of the mutated allele.

[0068] According to embodiments of the present invention, the frameshift creates an early stop codon in the mutated allele.

[0069] According to embodiments of the present invention, the frameshift results in nonsense-mediated mRNA decay of the transcript of the mutant allele.

[0070] According to embodiments of the present invention, the inactivating or treating results in a truncated protein encoded by the mutated allele and a functional protein encoded by the functional allele.

[0071] According to some embodiments of the present invention, there is provided use of a composition comprising an RNA molecule comprising a guide sequence portion having 17-20 nucleotides in the sequence of 17-20 contiguous nucleotides set forth in any one of SEQ ID NOs: 1-3010 and a CRISPR nuclease inactivating a mutant GUCY2D allele in a cell, comprising delivering to the cell the RNA molecule comprising a guide sequence portion having 17-20 nucleotides in the sequence of 17-20 contiguous nucleotides set forth in any one of SEQ ID NOs: 1-3010 and the CRISPR nuclease.

[0072] According to embodiments of the present invention, there is provided a medicament comprising an RNA molecule comprising a guide sequence portion having 17-20 nucleotides in the sequence of 17-20 contiguous nucleotides set forth in any one of SEQ ID NOs: 1-3010 and a CRISPR nuclease for use in inactivating a mutant GUCY2D allele in a cell, wherein the medicament is administered by delivering to the cell the composition comprising an RNA molecule comprising a guide sequence portion having 17-20 nucleotides in the sequence of 17-20 contiguous nucleotides set forth in any one of SEQ ID NOs: 1-3010 and a CRISPR nuclease.

[0073] According to some embodiments of the present invention, there is provided use of a composition comprising an RNA molecule comprising a guide sequence portion having 17-20 nucleotides in the sequence of 17-20 contiguous nucleotides set forth in any one of SEQ ID NOs: 1-3010 and a CRISPR nuclease for treating ameliorating or preventing CORD, comprising delivering to a subject having or at risk of having CORD the composition of comprising an RNA molecule comprising a guide sequence portion having 17-20 nucleotides in the sequence of 17-20 contiguous nucleotides set forth in any one of SEQ ID NOs: 1-3010 and a CRISPR nuclease.

[0074] According to some embodiments of the present invention, there is provided a medicament comprising the composition comprising an RNA molecule comprising a guide sequence portion having 17-20 nucleotides in the sequence of 17-20 contiguous nucleotides set forth in any one of SEQ ID NOs: 1-3010 and a CRISPR nuclease for use in treating ameliorating or preventing CORD, wherein the medicament is administered by delivering to a subject having or at risk of having CORD: the composition comprising an RNA molecule comprising a guide sequence portion having 17-20 nucleotides in the sequence of 17-20 contiguous nucleotides set forth in any one of SEQ ID NOs: 1-3010 and a CRISPR nuclease.

[0075] According to some embodiments of the present invention, there is provided a kit for inactivating a mutant GUCY2D allele in a cell, comprising an RNA molecule comprising a guide sequence portion having 17-20 nucleotides in the sequence of 17-20 contiguous nucleotides set forth in any one of SEQ ID NOs: 1-3010, a CRISPR nuclease, and/or a tracrRNA molecule; and instructions for delivering the RNA molecule; CRISPR nuclease, and/or the tracrRNA to the cell.

[0076] According to some embodiments of the present invention, there is provided a kit for treating CORD in a subject, comprising an RNA molecule comprising a guide sequence portion having 17-20 nucleotides in the sequence of 17-20 contiguous nucleotides set forth in any one of SEQ ID NOs: 1-3010, a CRISPR nuclease, and/or a tracrRNA molecule; and instructions for delivering the RNA molecule; CRISPR nuclease, and/or the tracrRNA to a subject having or at risk of having CORD.

[0077] In embodiments of the present invention, the RNA molecule comprises a guide sequence portion having 17-20 nucleotides in the sequence of 17-20 contiguous nucleotides set forth in any one of SEQ ID NOs: 1-742, SEQ ID NOs: 743-3010, or SEQ ID NOs 1-3010.

[0078] The compositions and methods of the present disclosure may be utilized for treating, preventing, ameliorating, or slowing progression of CORD.

[0079] In some embodiments, a mutated allele is deactivated by delivering to a cell an RNA molecule which targets a SNP in the promoter region, the start codon, or the untranslated region (UTR) of the mutated allele.

[0080] In some embodiments, a mutated allele is inactivated by removing at least a portion of the promoter and/or removing the start codon and/or a portion of the UTR. In some embodiments, the method of deactivating a mutated allele comprises removing at least a portion of the promoter. In such embodiments one RNA molecule may be designed for targeting a first SNP in the promoter or upstream to the promoter and another RNA molecule is designed to target a second SNP, which is downstream of the first SNP, and is in the promoter, in the UTR, or in an intron or in an exon. Alternatively, one RNA molecule may be designed for targeting a SNP in the promoter, or upstream of the promoter, or the UTR and another RNA molecule is designed to target a sequence which is present in an intron of both the mutated allele and the functional allele. Alternatively, one RNA molecule may be designed for targeting a sequence upstream of the promotor which is present in both the mutated and functional allele and the other guide is designed to target a SNP or disease-causing mutation in any location of the gene e.g., in an exon, intron, UTR, or downstream of the promoter.

[0081] In some embodiments, the method of deactivating a mutated allele comprises an exon skipping step comprising removing an exon containing a disease-causing mutation from the mutated allele. Removing an exon containing a disease-causing mutation in the mutated allele requires two RNA molecules which target regions flanking the entire exon or a portion of the exon. Removal of an exon containing the disease-causing mutation may be designed to eliminate the disease-causing action of the protein while allowing for expression of the remaining protein product which retains some or all of the wild-type activity. As an alternative to single exon skipping, multiple exons, the entire open reading frame or the entire gene can be excised using two RNA molecules flanking the region desired to be excised.

[0082] In some embodiments, the method of deactivating a mutated allele comprises delivering two RNA molecules to a cell, wherein one RNA molecule targets a SNP or disease-causing mutation in an exon or promoter of the mutated allele, and wherein the other RNA molecule targets a SNP in the same or a different exon of the mutated allele, a SNP in an intron, or a sequence in an intron present in both the mutated or functional allele.

[0083] In some embodiments, an RNA molecule is used to target a CRISPR nuclease to an alternative splicing signal sequence between an exon and an intron of a mutant allele, thereby destroying the alternative splicing signal sequence in the mutant allele.

[0084] Any one of, or combination of, the above-mentioned strategies for deactivating a mutant allele may be used in the context of the invention.

[0085] Additional strategies may be used to deactivate a mutated allele. For example, in embodiments of the present invention, an RNA molecule is used to direct a CRISPR nuclease to an exon or a splice site of a mutated allele in order to create a double-stranded break (DSB), leading to insertion or deletion of nucleotides by an error-prone non-homologous end-joining (NHEJ) mechanism and formation of a frameshift mutation in the mutated allele. The frameshift mutation may result in: (1) inactivation or knockout of the mutated allele by generation of an early stop codon in the mutated allele, resulting in generation of a truncated protein; or (2) nonsense mediated mRNA decay of the transcript of the mutant allele. In further embodiments, one RNA molecule is used to direct a CRISPR nuclease to a promotor of a mutated allele.

[0086] In some embodiments, the method of deactivating a mutated allele further comprises enhancing activity of the functional protein such as by providing a protein/peptide, a nucleic acid encoding a protein/peptide, or a small molecule such as a chemical compound, capable of activating/enhancing activity of the functional protein.

[0087] According to some embodiments, the present disclosure provides an RNA sequence (RNA molecule') which binds to/associates with and/or directs the RNA guided DNA nuclease e.g., CRISPR nuclease to a sequence comprising at least one nucleotide which differs between a mutated allele and a functional allele (e.g., SNP) of a gene of interest (i.e., a sequence of the mutated allele which is not present in the functional allele).

[0088] In some embodiments, the method comprises the steps of: contacting a mutated allele of a gene of interest with an allele-specific RNA molecule and a CRISPR nuclease e.g., a Cas9 protein, wherein the allele-specific RNA molecule and the CRISPR nuclease e.g., Cas9 associate with a nucleotide sequence of the mutated allele of the gene of interest which differs by at least one nucleotide from a nucleotide sequence of a functional allele of the gene of interest, thereby modifying or knocking-out the mutated allele.

[0089] In some embodiments, the allele-specific RNA molecule and a CRISPR nuclease is introduced to a cell encoding the gene of interest. In some embodiments, the cell encoding the gene of interest is in a mammalian subject. In some embodiments, the cell encoding the gene of interest is in a plant.

[0090] In some embodiments, the cleaved mutated allele is further subjected to insertion or deletion (indel) by an error prone non-homologous end joining (NHEJ) mechanism, generating a frameshift in the mutated allele's sequence. In some embodiments, the generated frameshift results in inactivation or knockout of the mutated allele. In some embodiments, the generated frameshift creates an early stop codon in the mutated allele and results in generation of a truncated protein. In such embodiments, the method results in the generation of a truncated protein encoded by the mutated allele and a functional protein encoded by the functional allele. In some embodiments, a frameshift generated in a mutated allele using the methods of the invention results in nonsense-mediated mRNA decay of the transcript of the mutant allele.

[0091] In some embodiments, the mutated allele is an allele of the GUCY2D gene. In some embodiments, the RNA molecule targets a SNP which co-exists with/is genetically linked to the mutated sequence associated with CORD genetic disorder. In some embodiments, the RNA molecule targets a SNP which is highly prevalent in the population and exists in the mutated allele having the mutated sequence associated with CORD genetic disorder and not in the functional allele of an individual subject to be treated. In some embodiments, a disease-causing mutation within a mutated GUCY2D allele is targeted.

[0092] In some embodiments, the SNP is within an exon of the gene of interest. In such embodiments, a guide sequence portion of an RNA molecule may be designed to associate with a sequence of the exon of the gene of interest.

[0093] In some embodiments, SNP is within an intron or an exon of the gene of interest. In some embodiments, SNP is in close proximity to a splice site between the intron and the exon. In some embodiments, the close proximity to a splice site is 1, 2, 3, 4, 5, 6, 7, 8, 9, 10, 11, 12, 13, 14, 15, 16, 17, 18, 19, or 20 nucleotides upstream or downstream to the splice site. Each possibility represents a separate embodiment of the present invention. In such embodiments, a guide sequence portion of an RNA molecule may be designed to associate with a sequence of the gene of interest which comprises the splice site.

[0094] In some embodiments, the method is utilized for treating a subject having a disease phenotype resulting from the heterozygote GUCY2D gene. In such embodiments, the method results in improvement, amelioration or prevention of the disease phenotype.

[0095] Embodiments referred to above refer to a CRISPR nuclease, RNA molecule(s), and tracrRNA being effective in a subject or cells at the same time. The CRISPR, RNA molecule(s), and tracrRNA can be delivered substantially at the same time or can be delivered at different times but have effect at the same time. For example, this includes delivering the CRISPR nuclease to the subject or cells before the RNA molecule and/or tracr RNA is substantially extant in the subject or cells.

[0096] In some embodiments, the cell is a retinal cell. In some embodiments, the cell is a photoreceptor cell. In some embodiments, the photoreceptor cell is a rod photoreceptor cell. In some embodiments, the photoreceptor cell is a cone photoreceptor cell.

### Dominant Genetic Disorders.

[0097] One of skill in the art will appreciate that all subjects with any type of heterozygote genetic disorder (e.g., dominant genetic disorder) may be subjected to the methods described herein. In one embodiment, the present invention may be used to target a gene involved in, associated with, or causative of dominant genetic disorders such as, for example CORD. In some embodiments, the dominant genetic disorder is CORD In some embodiments, the target gene is the GUCY2D gene (Entrez Gene, gene ID No: 3000). s

[0098] CRISPR Nucleases and PAM Recognition

[0099] In some embodiments, the sequence specific nuclease is selected from CRISPR nucleases, or a functional variant thereof. In some embodiments, the sequence specific nuclease is an RNA guided DNA nuclease. In such embodiments, the RNA sequence which guides the RNA guided DNA nuclease (e.g., Cpf1) binds to and/or directs the RNA guided DNA nuclease to the sequence comprising at least one nucleotide which differs between a mutated allele and its counterpart functional allele (e.g., SNP). In some embodiments, the CRISPR complex does not further comprise a tracrRNA. In a non-limiting example, in which the RNA guided DNA nuclease is a CRISPR protein, the at least one nucleotide which differs between the dominant mutated allele and the functional allele may be within the PAM site and/or proximal to the PAM site within the region that the RNA molecule is designed to hybridize to. A skilled artisan will appreciate that RNA molecules can be engineered to bind to a target of choice in a genome by commonly known methods in the art.

[0100] In embodiments of the present invention, a type II CRISPR system utilizes a mature crRNA:tracrRNA complex directs a CRISPR nuclease, e.g. Cas9, to the target DNA via Watson-Crick base-pairing between the crRNA and the protospacer on the target DNA next to the protospacer adjacent motif (PAM), an additional requirement for target recognition. The CRISPR nuclease then mediates cleavage of target DNA to create a double-stranded break within the protospacer. A skilled artisan will appreciate that each of the engineered RNA molecule of the present invention is further designed such as to associate with a target genomic DNA sequence of interest next to a protospacer adjacent motif (PAM), e.g., a PAM matching the sequence relevant for the type of CRISPR nuclease utilized, such as for a non-limiting example, NGG or NAG, wherein “N” is any nucleobase, for Streptococcus pyogenes Cas9 WT (SpCAS9); NNGRRT for Staphylococcus aureus (SaCas9); NNNVRYM for Jejuni Cas9 WT; NGAN or NGNG for SpCas9-VQR variant; NGCG for SpCas9-VRER variant; NGAG for SpCas9-EQR variant; NNNNGATT for Neisseria meningitidis (NmCas9); or TTTV for Cpf1. RNA molecules of the present invention are each designed to form complexes in conjunction with one or more different CRISPR nucleases and designed to target polynucleotide sequences of interest utilizing one or more different PAM sequences respective to the CRISPR nuclease utilized.

[0101] In some embodiments, an RNA-guided DNA nuclease e.g., a CRISPR nuclease, may be used to cause a DNA break at a desired location in the genome of a cell. The most commonly used RNA-guided DNA nucleases are derived from CRISPR systems, however, other RNA-guided DNA nucleases are also contemplated for use in the genome editing compositions and methods described herein. For instance, see U.S. Patent Publication No. 2015-0211023, incorporated herein by reference.

[0102] CRISPR systems that may be used in the practice of the invention vary greatly. CRISPR systems can be a type I, a type II, or a type III system. Non-limiting examples of suitable CRISPR proteins include Cas3, Cas4, Cas5, Cas5e (or CasD), Cas6, Cas6e, Cas6f, Cas7, Cas8a1, Cas8a2, Cas8b, Cas8c, Cas9, Cas10, Cas1 Od, CasF, CasG, CasH, Csy1 , Csy2, Csy3, Cse1 (or CasA), Cse2 (or CasB), Cse3 (or CasE), Cse4 (or CasC), Csc1, Csc2, Csa5, Csn2, Csm2, Csm3, Csm4, Csm5, Csm6, Cmr1, Cmr3, Cmr4, Cmr5, Cmr6, Csb1, Csb2, Csb3,Csx17, Csx14, Csx10, Csx16, CsaX, Csx3, Csz1, Csx15, Csf1, Csf2, Csf3, Csf4, and Cul966.

[0103] In some embodiments, the RNA-guided DNA nuclease is a CRISPR nuclease derived from a type II CRISPR system (e.g., Cas9). The CRISPR nuclease may be derived from Streptococcus pyogenes, Streptococcus thermophilus, Streptococcus sp., Staphylococcus aureus, Neisseria meningitidis, Treponema denticola, Nocardiopsis dassonvillei, Streptomyces pristinaespiralis, Streptomyces viridochromogenes, Streptomyces viridochromogenes, Streptosporangium roseum, Streptosporangium roseum, Alicyclobacillus acidocaldarius, Bacillus pseudomycoides, Bacillus selenitireducens, Exiguobacterium sibiricum, Lactobacillus delbrueckii, Lactobacillus salivarius, Microscilla marina, Burkholderiales bacterium, Polaromonas naphthalenivorans, Polaromonas sp., Crocosphaera watsonii, Cyanothece sp., Microcystis aeruginosa, Synechococcus sp., Acetohalobium arabaticum, Ammonifex degensii, Caldicelulosiruptor becscii, Candidatus Desulforudis, Clostridium botulinum, Clostridium difjicile, Finegoldia magna, Natranaerobius thermophilus, Pelotomaculumthermopropionicum, Acidithiobacillus caldus, Acidithiobacillus ferrooxidans, Allochromatium vinosum, Marinobacter sp., Nitrosococcus halophilus, Nitrosococcus watsoni, Pseudoalteromonas haloplanktis, Ktedonobacter racemifer, Methanohalobium evestigatum, Anabaena variabilis, Nodularia spumigena, Nostoc sp., Arthrospira maxima, Arthrospira platensis, Arthrospira sp., Lyngbya sp., Microcoleus chthonoplastes, Oscillatoria sp., Petrotoga mobilis, Thermosipho africanus, Acaryochloris marina, or any species which encodes a CRISPR nuclease with a known PAM sequence. CRISPR nucleases encoded by uncultured bacteria may also be used in the context of the invention. (See Burstein et al. Nature, 2017). Variants of CRIPSR proteins having known PAM sequences e.g., spCas9 D1135E variant, spCas9 VQR variant, spCas9 EQR variant, or spCas9 VRER variant may also be used in the context of the invention.

[0104] Thus, an RNA guided DNA nuclease of a CRISPR system, such as a Cas9 protein or modified Cas9 or homolog or ortholog of Cas9, or other RNA guided DNA nucleases belonging to other types of CRISPR systems, such as Cpf1and its homologs and orthologs, may be used in the compositions of the present invention.

[0105] In certain embodiments, the CRIPSR nuclease may be a “functional derivative” of a naturally occurring Cas protein. A “functional derivative” of a native sequence polypeptide is a compound having a qualitative biological property in common with a native sequence polypeptide. “Functional derivatives” include, but are not limited to, fragments of a native sequence and derivatives of a native sequence polypeptide and its fragments, provided that they have a biological activity in common with a corresponding native sequence polypeptide. A biological activity contemplated herein is the ability of the functional derivative to hydrolyze a DNA substrate into fragments. The term “derivative” encompasses both amino acid sequence variants of polypeptide, covalent modifications, and fusions thereof. Suitable derivatives of a Cas polypeptide or a fragment thereof include but are not limited to mutants, fusions, covalent modifications of Cas protein or a fragment thereof. Cas protein, which includes Cas protein or a fragment thereof, as well as derivatives of Cas protein or a fragment thereof, may be obtainable from a cell or synthesized chemically or by a combination of these two procedures. The cell may be a cell that naturally produces Cas protein, or a cell that naturally produces Cas protein and is genetically engineered to produce the endogenous Cas protein at a higher expression level or to produce a Cas protein from an exogenously introduced nucleic acid, which nucleic acid encodes a Cas that is same or different from the endogenous Cas. In some cases, the cell does not naturally produce Cas protein and is genetically engineered to produce a Cas protein.

[0106] In some embodiments, the CRISPR nuclease is Cpf1. Cpf1is a single RNA-guided endonuclease which utilizes a T-rich protospacer-adjacent motif. Cpf1cleaves DNA via a staggered DNA double-stranded break. Two Cpf1enzymes from Acidaminococcus and Lachnospiraceae have been shown to carry out efficient genome-editing activity in human cells. (See Zetsche et al. (2015) Cell.).

[0107] Thus, an RNA guided DNA nuclease of a Type II CRISPR System, such as a Cas9 protein or modified Cas9 or homologs, orthologues, or variants of Cas9, or other RNA guided DNA nucleases belonging to other types of CRISPR systems, such as Cpf1and its homologs, orthologues, or variants, may be used in the present invention.

[0108] In some embodiments, the guide molecule comprises one or more chemical modifications which imparts a new or improved property (e.g., improved stability from degradation, improved hybridization energetics, or improved binding properties with an RNA guided DNA nuclease). Suitable chemical modifications include, but are not limited to: modified bases, modified sugar moieties, or modified inter-nucleoside linkages. Non-limiting examples of suitable chemical modifications include: 4-acetylcytidine, 5-(carboxyhydroxymethyl)uridine, 2′-O-methylcytidine, 5-carboxymethylaminomethyl-2-thiouridine, 5-carboxymethylaminomethyluridine, dihydrouridine, 2′-O-methylpseudouridine, “beta, D-galactosylqueuosine”, 2′-O-methylguanosine, inosine, N6-isopentenyl adenosine, 1-methyladenosine, 1-methylpseudouridine, 1-methylguanosine, 1-methylinosine, “2,2-dimethylguanosine”, 2-methyladenosine, 2-methylguanosine, 3-methylcytidine, 5-methylcytidine, N6-methyladenosine, 7-methylguanosine, 5-methylaminomethyluridine, methoxyaminomethyl-2-thiouridine, “beta, D-mannosylqueuosine”, methoxycarbonylmethyl-2-thiouridine, 5-methoxycarbonylmethyluridine, 5-methoxyudridine, 2-methylthio-N6-isopentenyladenosine, N-((9-beta-D-ribofuranosyl-2-methylthiopurine-6-yl)carbamoyl)threonine, N-((9-beta-D-ribofuranosylpurine-6-yl)N-methylcarbamoyl)threonine, uridine-5-oxyacetic acid-methylester, uridine-5-oxyacetic acid, wybutoxosine, queuosine, 2-thiocytidine, 5-methyl-2-thiourdine, 2-thiouridine, 4-thiouridine, 5-methyluridine, N-((9-beta-D-ribofuranosylpurine-6-yl)-carbamoyl)threonine, 2′-O-methyl-5-methyluridine, 2′-O-methyluridine, wybutosine, “3-(3-amino-3-carboxy-propyl)uridine, (acp3)u”, 2′-0-methyl (M), 3′-phosphorothioate (MS), 3′-thioPACE (MSP), pseudouridine, or 1-methyl pseudo-uridine. Each possibility represents a separate embodiment of the present invention.

Guide Sequences which Specifically Target a Mutant Allele

[0109] A given gene may contain thousands of SNPs. Utilizing a 24 base pair target window for targeting each SNP in a gene would require hundreds of thousands of guide sequences. Any given guide sequence when utilized to target a SNP may result in degradation of the guide sequence, limited activity, no activity, or off-target effects. Accordingly, suitable guide sequences are necessary for targeting a given gene. By the present invention, a novel set of guide sequences have been identified for knocking out expression of a mutated GUCY2D protein, inactivating a mutant GUCY2D gene allele, and treating CORD.

[0110] The present disclosure provides guide sequences capable of specifically targeting a mutated allele for inactivation while leaving the functional allele unmodified. The guide sequences of the present invention are designed to, and are most likely to, specifically differentiate between a mutated allele and a functional allele. Of all possible guide sequences which target a mutated allele desired to be inactivated, the specific guide sequences disclosed herein are specifically effective to function with the disclosed embodiments.

[0111] Briefly, the guide sequences may have properties as follows: (1) target SNP/insertion/deletion/indel with a high prevalence in the general population, in a specific ethnic population or in a patient population is above 1% and the SNP/insertion/deletion/indel heterozygosity rate in the same population is above 1%; (2) target a location of a SNP/insertion/deletion/indel proximal to a portion of the gene e.g., within 5 k bases of any portion of the gene, for example, a promoter, a UTR, an exon or an intron; and (3) target a mutant allele using an RNA molecule which targets a founder or common pathogenic mutations for the disease/gene. In some embodiments, the prevalence of the SNP/insertion/deletion/indel in the general population, in a specific ethnic population or in a patient population is above 1%, 2%, 3%, 4%, 5%, 6%, 7%, 8%, 9%, 10%, 11%, 12%, 13%, 14%, or 15% and the SNP/insertion/deletion/indel heterozygosity rate in the same population is above 1%, 2%, 3%, 4%, 5%, 6%, 7%, 8%, 9%, 10%, 11%, 12%, 13%, 14%, or 15%. Each possibility represents a separate embodiment and may be combined at will.

[0112] For each gene, according to SNP/insertion/deletion/indel any one of the following strategies may be used to deactivate the mutated allele: (1) Knockout strategy using one RNA molecule—one RNA molecule is utilized to direct a CRISPR nuclease to a mutated allele and create a double-strand break (DSB) leading to formation of a frameshift mutation in an exon or in a splice site region of the mutated allele; (2) Knockout strategy using two RNA molecules—two RNA molecules are utilized. A first RNA molecule targets a region in the promoter or an upstream region of a mutated allele and another RNA molecule targets downstream of the first RNA molecule in a promoter, exon, or intron of the mutated allele; (3) Exon(s) skipping strategy—one RNA molecule may be used to target a CRISPR nuclease to a splice site region, either at the 5′ end of an intron (donor sequence) or the 3′ end of an intron (acceptor sequence), in order to destroy the splice site. Alternatively, two RNA molecules may be utilized such that a first RNA molecule targets an upstream region of an exon and a second RNA molecule targets a region downstream of the first RNA molecule, thereby excising the exon(s). Based on the locations of identified SNPs/insertions/deletions/indels for each mutant allele, any one of, or a combination of, the above-mentioned methods to deactivate the mutant allele may be utilized.

[0113] When only one RNA molecule is used is that the location of the SNP is in an exon or in close proximity (e.g., within 20 basepairs) to a splice site between the intron and the exon. When two RNA molecules are used, guide sequences may target two SNPs such that the first SNP is upstream of exon 1 e.g., within the 5′ untranslated region, or within the promoter or within the first 2 kilobases 5′ of the transcription start site, and the second SNP is downstream of the first SNP e.g., within the first 2 kilobases 5′ of the transcription start site, or within intron 1, 2 or 3, or within exon 1, exon 2, or exon 3.

[0114] Guide sequences of the present invention may target a SNP in the upstream portion of the targeted gene, preferably upstream of the last exon of the targeted gene. Guide sequences may target a SNP upstream to exon 1, for example within the 5′ untranslated region, or within the promoter or within the first 4-5 kilobases 5′ of the transcription start site.

[0115] Guide sequences of the present invention may also target a SNP within close proximity (e.g., within 50 basepairs, more preferably with 20 basepairs) to a known protospacer adjacent motif (PAM) site.

[0116] Guide sequences of the present invention also may target: (1) a heterozygous SNP for the targeted gene; (2) a heterozygous SNPs upstream and downstream of the gene; (3) a SNPs with a prevalence of the SNP/insertion/deletion/indel in the general population, in a specific ethnic population, or in a patient population above 1%; (4) have a guanine-cytosine content of greater than 30% and less than 85%; (5) have no repeat of 4 or more thymine/uracil or 8 or more guanine, cytosine, or adenine; (6) having no off-target identified by off-target analysis; and (7) preferably target Exons over Introns or be upstream of a SNP rather than downstream of a SNP.

[0117] In embodiments of the present invention, the SNP may be upstream or downstream of the gene. In embodiments of the present invention, the SNP is within 4,000 base pairs upstream or downstream of the gene.

[0118] The at least one nucleotide which differs between the mutated allele and the functional allele, may be upstream, downstream or within the sequence of the disease-causing mutation of the gene of interest. The at least one nucleotide which differs between the mutated allele and the functional allele, may be within an exon or within an intron of the gene of interest. In some embodiments, the at least one nucleotide which differs between the mutated allele and the functional allele is within an exon of the gene of interest. In some embodiments, the at least one nucleotide which differs between the mutated allele and the functional allele is within an intron or an exon of the gene of interest, in close proximity to a splice site between the intron and the exon e.g., 1, 2, 3, 4, 5, 6, 7, 8, 9, 10, 11, 12, 13, 14, 15, 16, 17, 18, 19, or 20 nucleotides upstream or downstream to the splice site.

[0119] In some embodiments, the at least one nucleotide is a single nucleotide polymorphisms (SNPs). In some embodiments, each of the nucleotide variants of the SNP may be expressed in the mutated allele. In some embodiments, the SNP may be a founder or common pathogenic mutation. Guide sequences may target a SNP which has both (1) a high prevalence in the general population e.g., above 1% in the population; and (2) a high heterozygosity rate in the population, e.g., above 1%. Guide sequences may target a SNP that is globally distributed. A SNP may be a founder or common pathogenic mutation. In some embodiments, the prevalence in the general population is above 1%, 2%, 3%, 4%, 5%, 6%, 7%, 8%, 9%, 10%, 11%, 12%, 13%, 14%, or 15%. Each possibility represents a separate embodiment. In some embodiments, the heterozygosity rate in the population is above 1%, 2%, 3%, 4%, 5%, 6%, 7%, 8%, 9%, 10%, 11%, 12%, 13%, 14%, or 15%. Each possibility represents a separate embodiment.

[0120] In some embodiments, the at least one nucleotide which differs between the mutated allele and the functional allele is linked to/co-exists with the disease-causing mutation in high prevalence in a population. In such embodiments, “high prevalence” refers to at least 92%, 93%, 94%, 95%, 96%, 97%, 98%, 99%, or 100%. Each possibility represents a separate embodiment of the present invention. In one embodiment, the at least one nucleotide which differs between the mutated allele and the functional allele, is a disease-associated mutation. In some embodiments, the SNP is highly prevalent in the population. In such embodiments, “highly prevalent” refers to at least 10%, 11%, 12%, 13%, 14%, 15%, 20%, 30%, 40%, 50%, 60%, or 70% of a population. Each possibility represents a separate embodiment of the present invention.

[0121] Guide sequences of the present invention may satisfy any one of the above criteria and are most likely to differentiate between a mutated allele from its corresponding functional allele.

[0122] In some embodiments the RNA molecule targets a SNP/WT sequence linked to SNPs as shown in Table 1 below. The SNP details are indicated in the 1^{st} column and include: SNP ID No. (based on NCBI's 2018 database of Single Nucleotide Polymorphisms (dbSNP)). For variants with no available rs number variants characteristic are indicated based on gnomAD 2018 browser database. The 2^{nd} column indicates an assigned identifier for each SNP. The 3^{rd} column indicates the location of each SNP on the GUCY2D gene.

TABLE 1
GUCY2D gene SNPs

| RSID | SNP No. | SNP location in the gene |
|---|---|---|
| rs761913009 | s1 | Intron_19 of 19 |
| 17:7923438_C_T | s2 | Intron_19 of 19 |
| 17:7923435_C_T | s3 | Intron_19 of 19 |
| 17:7923434_G_T | s4 | Intron_19 of 19 |
| rs56300556 | s5 | downstream +1113 bp |
| rs867805871 | s6 | downstream +1112 bp |
| rs760500680 | s7 | downstream +1106 bp |
| rs3813585 | s8 | Intron_14 of 19 |
| rs7503918 | s9 | Intron_19 of 19 |
| rs4791456 | s10 | downstream +203 bp |
| rs9889612 | s11 | upstream −1603 bp |
| rs11655487 | s12 | Intron_12 of 19 |
| rs7501868 | s13 | Intron_19 of 19 |
| rs4792111 | s14 | Intron_19 of 19 |
| rs7501530 | s15 | upstream −2377 bp |
| rs61749665 | s16 | Exon_2 of 20 |
| rs12103521 | s17 | Intron_19 of 19 |
| rs2816 | s18 | Exon_20 of 20 |
| rs8069344 | s19 | Exon_12 of 20 |
| rs12103519 | s20 | Intron_19 of 19 |
| rs8071166 | s21 | Intron_19 of 19 |
| rs72841478 | s22 | Intron_3 of 19 |
| rs11655691 | s23 | Intron_19 of 19 |
| rs56130505 | s24 | Exon_10 of 20 |
| rs3829789 | s25 | Exon_3 of 20 |
| rs34922798 | s26 | Intron_8 of 19 |
| rs9905402 | s27 | Exon_2 of 20 |
| rs72841482 | s28 | Intron_13 of 19 |
| rs8068722 | s29 | Intron_13 of 19 |
| rs73237655 | s30 | Intron_7 of 19 |
| rs9914686 | s31 | Intron_3 of 19 |
| rs12449814 | s32 | Intron_7 of 19 |
| rs73237639 | s33 | upstream −3180 bp |
| rs9903069 | s34 | upstream −2486 bp |
| 17:7906016_C_T | s35 | Exon_1 of 20 |
| rs34598902 | s36 | Exon_10 of 20 |
| rs57490393 | s37 | downstream +1088 bp |
| rs57307096 | s38 | downstream +1090 bp |
| rs12103471 | s39 | Intron_13 of 19 |
| rs80076597 | s40 | Intron_19 of 19 |
| rs56348143 | s41 | Intron_16 of 19 |
| rs60130989 | s42 | Intron_10 of 19 |
| rs57477973 | s43 | downstream +2441 bp |
| rs58765638 | s44 | downstream +2669 bp |
| rs112984002 | s45 | Intron_5 of 19 |
| rs73978653 | s46 | Intron_7 of 19 |
| rs142351773 | s47 | Exon_19 of 20 |
| rs116870332 | s48 | Intron_16 of 19 |
| rs138596240 | s49 | Exon_20 of 20 |
| rs56034424 | s50 | Exon_4 of 20 |
| rs139731548 | s51 | Intron_9 of 19 |
| rs79887212 | s52 | Intron_18 of 19 |
| rs74656480 | s53 | Intron_19 of 19 |
| rs78901930 | s54 | Exon_20 of 20 |
| rs73978656 | s55 | Intron_19 of 19 |
| rs73978658 | s56 | Intron_19 of 19 |
| rs73978654 | s57 | Intron_19 of 19 |
| rs4791452 | s58 | Intron_7 of 19 |
| rs57184071 | s59 | Intron_8 of 19 |
| rs72841481 | s60 | Intron_11 of 19 |
| rs80245692 | s61 | Intron_5 of 19 |
| rs28743021 | s62 | Exon_8 of 20 |
| rs78844078 | s63 | Intron_16 of 19 |
| rs78380494 | s64 | Intron_19 of 19 |
| rs56316238 | s65 | Exon_13 of 20 |
| rs73978655 | s66 | Intron_19 of 19 |
| rs2534 | s67 | Intron_8 of 19 |
| rs75290069 | s68 | Intron_3 of 19 |
| rs34594470 | s69 | Intron_8 of 19 |
| rs9891219 | s70 | Intron_8 of 19 |
| rs6503069 | s71 | downstream +1197 bp |
| rs34898068 | s72 | upstream −2657 bp |
| rs67594392 | s73 | Intron_19 of 19 |
| rs9901134 | s74 | upstream −3866 bp |
| rs79016382 | s75 | downstream +3155 bp |
| rs149260011 | s76 | Intron_8 of 19 |

### Delivery to Cells

[0123] The RNA molecule compositions described herein may be delivered to a target cell by any suitable means. RNA molecule compositions of the present invention may be targeted to any cell which contains and/or expresses a dominant negative allele, including any mammalian or plant cell. For example, in one embodiment the RNA molecule specifically targets a mutated GUCY2D allele and the target cell is a retinal cell such as pigment epithelium (RPE), photoreceptors (e.g., rod and cone), glial cells (e.g., Müller), and ganglion cells. Further, the nucleic acid compositions described herein may be delivered as one or more DNA molecules, RNA molecules, Ribonucleoproteins (RNP), nucleic acid vectors, or any combination thereof.

[0124] In some embodiments, the RNA molecule comprises a chemical modification. Non-limiting examples of suitable chemical modifications include 2′-0-methyl (M), 2′-0-methyl, 3′phosphorothioate (MS) or 2′-0-methyl, 3 'thioPACE (MSP), pseudouridine, and 1-methyl pseudo-uridine. Each possibility represents a separate embodiment of the present invention.

[0125] Any suitable viral vector system may be used to deliver nucleic acid compositions e.g., the RNA molecule compositions of the subject invention. Conventional viral and non-viral based gene transfer methods can be used to introduce nucleic acids and target tissues. In certain embodiments, nucleic acids are administered for in vivo or ex vivo gene therapy uses. Non-viral vector delivery systems include naked nucleic acid, and nucleic acid complexed with a delivery vehicle such as a liposome or poloxamer. For a review of gene therapy procedures, see Anderson (1992) Science 256:808-813; Nabel & Felgner (1993) TIBTECH 11:211-217; Mitani & Caskey (1993) TIBTECH 11:162-166; Dillon (1993) TIBTECH 11:167-175; Miller (1992) Nature 357:455-460; Van Brunt (1988) Biotechnology 6(10):1149-1154; Vigne (1995) Restorative Neurology and Neuroscience 8:35-36; Kremer & Perricaudet (1995) British Medical Bulletin 51(1):31-44; Haddada et al. (1995) in Current Topics in Microbiology and Immunology Doerfler and Bohm (eds.); and Yu et al. (1994) Gene Therapy 1:13-26.

[0126] Methods of non-viral delivery of nucleic acids and/or proteins include electroporation, lipofection, microinjection, biolistics, particle gun acceleration, virosomes, liposomes, immunoliposomes, lipid nanoparticles (LNPs), polycation or lipid:nucleic acid conjugates, artificial virions, and agent-enhanced uptake of nucleic acids or can be delivered to plant cells by bacteria or viruses (e.g., Agrobacterium, Rhizobium sp. NGR234, Sinorhizoboiummeliloti, Mesorhizobium loti, tobacco mosaic virus, potato virus X, cauliflower mosaic virus and cassava vein mosaic virus). (See, e.g., Chung et al. (2006) Trends Plant Sci. 11(1):1-4). Sonoporation using, e.g., the Sonitron 2000 system (Rich-Mar), can also be used for delivery of nucleic acids. Cationic-lipid mediated delivery of proteins and/or nucleic acids is also contemplated as an in vivo or in vitro delivery method. (See Zuris et al. (2015) Nat. Biotechnol. 33(1):73-80; see also Coelho et al. (2013) N. Engl. J. Med. 369, 819-829; Judge et al. (2006) Mol. Ther. 13, 494-505; and Basha et al. (2011) Mol. Ther. 19, 2186-2200).

[0127] Additional exemplary nucleic acid delivery systems include those provided by Amaxa.RTM. Biosystems (Cologne, Germany), Maxcyte, Inc. (Rockville, Md.), BTX Molecular Delivery Systems (Holliston, Mass.) and Copernicus Therapeutics Inc., (see, e.g., U.S. Pat. No. 6,008,336). Lipofection is described in e.g., U.S. Pat. No. 5,049,386, U.S. Pat. No. 4,946,787; and U.S. Pat. No. 4,897,355, and lipofection reagents are sold commercially (e.g., Transfectam™, Lipofectin™ and Lipofectamine™ RNAiMAX). Cationic and neutral lipids that are suitable for efficient receptor-recognition lipofection of polynucleotides include those of Felgner, WO 91/17424, WO 91/16024. Delivery can be to cells (ex vivo administration) or target tissues (in vivo administration).

[0128] The preparation of lipid:nucleic acid complexes, including targeted liposomes such as immunolipid complexes, is well known to one of skill in the art (See, e.g., Crystal (1995) Science 270:404-410; Blaese et al. (1995) Cancer Gene Ther. 2:291-297; Behr et al. (1994) Bioconjugate Chem. 5:382-389; Remy et al. (1994) Bioconjugate Chem. 5:647-654; Gao et al. (1995) Gene Therapy 2:710-722; Ahmad et al. (1992) Cancer Res. 52:4817-4820; U.S. Pat. Nos. 4,186,183, 4,217,344, 4,235,871, 4,261,975, 4,485,054, 4,501,728, 4,774,085, 4,837,028, and 4,946,787).

[0129] Additional methods of delivery include the use of packaging the nucleic acids to be delivered into EnGenelC delivery vehicles (EDVs). These EDVs are specifically delivered to target tissues using bispecific antibodies where one arm of the antibody has specificity for the target tissue and the other has specificity for the EDV. The antibody brings the EDVs to the target cell surface and then the EDV is brought into the cell by endocytosis. Once in the cell, the contents are released (See MacDiarmid et al (2009) Nature Biotechnology 27(7):643).

[0130] The use of RNA or DNA viral based systems for viral mediated delivery of nucleic acids take advantage of highly evolved processes for targeting a virus to specific cells in the body and trafficking the viral payload to the nucleus. Viral vectors can be administered directly to patients (in vivo) or they can be used to treat cells in vitro and the modified cells are administered to patients (ex vivo). Conventional viral based systems for the delivery of nucleic acids include, but are not limited to, retroviral, lentivirus, adenoviral, adeno-associated, vaccinia and herpes simplex virus vectors for gene transfer.

[0131] The tropism of a retrovirus can be altered by incorporating foreign envelope proteins, expanding the potential target population of target cells. Lentiviral vectors are retroviral vectors that are able to transduce or infect non-dividing cells and typically produce high viral titers. Selection of a retroviral gene transfer system depends on the target tissue. Retroviral vectors are comprised of cis-acting long terminal repeats with packaging capacity for up to 6-10 kb of foreign sequence. The minimum cis-acting LTRs are sufficient for replication and packaging of the vectors, which are then used to integrate the therapeutic gene into the target cell to provide permanent transgene expression. Widely used retroviral vectors include those based upon murine leukemia virus (MuLV), gibbon ape leukemia virus (GaLV), Simian

[0132] Immunodeficiency virus (SIV), human immunodeficiency virus (HIV), and combinations thereof (See, e.g., Buchschacher et al. (1992) J. Virol. 66:2731-2739; Johann et al. (1992) J. Virol. 66:1635-1640; Sommerfelt et al. (1990) Virol. 176:58-59; Wilson et al. (1989) J. Virol. 63:2374-2378; Miller et al. (1991) J. Virol. 65:2220-2224; PCT/US94/05700).

[0133] At least six viral vector approaches are currently available for gene transfer in clinical trials, which utilize approaches that involve complementation of defective vectors by genes inserted into helper cell lines to generate the transducing agent.

[0134] pLASN and MFG-S are examples of retroviral vectors that have been used in clinical trials (Dunbar et al. (1995) Blood 85:3048-305; Kohn et al.(1995) Nat. Med. 1:1017-102; Malech et al. (1997) PNAS 94:22 12133-12138). PA317/pLASN was the first therapeutic vector used in a gene therapy trial. (Blaese et al. (1995). Transduction efficiencies of 50% or greater have been observed for MFG-S packaged vectors. (Ellem et al. (1997) Immunol Immunother. 44(1):10-20; Dranoff et al. (1997) Hum. Gene Ther. 1:111-2).

[0135] Packaging cells are used to form virus particles that are capable of infecting a host cell. Such cells include 293 cells, which package adenovirus, AAV, and Psi-2 cells or PA317 cells, which package retrovirus. Viral vectors used in gene therapy are usually generated by a producer cell line that packages a nucleic acid vector into a viral particle. The vectors typically contain the minimal viral sequences required for packaging and subsequent integration into a host (if applicable), other viral sequences being replaced by an expression cassette encoding the protein to be expressed. The missing viral functions are supplied in trans by the packaging cell line. For example, AAV vectors used in gene therapy typically only possess inverted terminal repeat (ITR) sequences from the AAV genome which are required for packaging and integration into the host genome. Viral DNA is packaged in a cell line, which contains a helper plasmid encoding the other AAV genes, namely rep and cap, but lacking ITR sequences. The cell line is also infected with adenovirus as a helper. The helper virus promotes replication of the AAV vector and expression of AAV genes from the helper plasmid. The helper plasmid is not packaged in significant amounts due to a lack of ITR sequences. Contamination with adenovirus can be reduced by, e.g., heat treatment to which adenovirus is more sensitive than AAV. Additionally, AAV can be produced at clinical scale using baculovirus systems (see U.S. Pat. No. 7,479,554).

[0136] In many gene therapy applications, it is desirable that the gene therapy vector be delivered with a high degree of specificity to a particular tissue type. Accordingly, a viral vector can be modified to have specificity for a given cell type by expressing a ligand as a fusion protein with a viral coat protein on the outer surface of the virus. The ligand is chosen to have affinity for a receptor known to be present on the cell type of interest. For example, Han et al. (1995) Proc. Natl. Acad. Sci. USA 92:9747-9751, reported that Moloney murine leukemia virus can be modified to express human heregulin fused to gp70, and the recombinant virus infects certain human breast cancer cells expressing human epidermal growth factor receptor. This principle can be extended to other virus-target cell pairs, in which the target cell expresses a receptor and the virus expresses a fusion protein comprising a ligand for the cell-surface receptor. For example, filamentous phage can be engineered to display antibody fragments (e.g., FAB or Fv) having specific binding affinity for virtually any chosen cellular receptor. Although the above description applies primarily to viral vectors, the same principles can be applied to nonviral vectors. Such vectors can be engineered to contain specific uptake sequences which favor uptake by specific target cells.

[0137] Gene therapy vectors can be delivered in vivo by administration to an individual patient, typically by systemic administration (e.g., intravitreal, intravenous, intraperitoneal, intramuscular, subdermal, or intracranial infusion) or topical application, as described below. Alternatively, vectors can be delivered to cells ex vivo, such as cells explanted from an individual patient (e.g., lymphocytes, bone marrow aspirates, tissue biopsy) or universal donor hematopoietic stem cells, followed by reimplantation of the cells into a patient, usually after selection for cells which have incorporated the vector.

[0138] Ex vivo cell transfection for diagnostics, research, or for gene therapy (e.g., via re-infusion of the transfected cells into the host organism) is well known to those of skill in the art. In a preferred embodiment, cells are isolated from the subject organism, transfected with a nucleic acid composition, and re-infused back into the subject organism (e.g., patient). Various cell types suitable for ex vivo transfection are well known to those of skill in the art (See, e.g., Freshney et al. (1994) Culture of Animal Cells, A Manual of Basic Technique, 3rd ed, and the references cited therein for a discussion of how to isolate and culture cells from patients).

[0139] Suitable cells include, but are not limited to, eukaryotic cells and/or cell lines. Non-limiting examples of such cells or cell lines generated from such cells include COS, CHO (e.g., CHO—S, CHO-K1, CHO-DG44, CHO-DUXB11, CHO-DUKX, CHOK1SV), VERO, MDCK, WI38, V79, B14AF28-G3, BHK, HaK, NSO, SP2/0-Ag14, HeLa, HEK293 (e.g., HEK293-F, HEK293-H, HEK293-T), perC6 cells, any plant cell (differentiated or undifferentiated), as well as insect cells such as Spodopterafugiperda (Sf), or fungal cells such as Saccharomyces, Pichia and Schizosaccharomyces. In certain embodiments, the cell line is a CHO-K1, MDCK or HEK293 cell line. Additionally, primary cells may be isolated and used ex vivo for reintroduction into the subject to be treated following treatment with a guided nuclease system (e.g. CRISPR/Cas). Suitable primary cells include peripheral blood mononuclear cells (PBMC), and other blood cell subsets such as, but not limited to, CD4+ T cells or CD8+ T cells. Suitable cells also include stem cells such as, by way of example, embryonic stem cells, induced pluripotent stem cells, hematopoietic stem cells (CD34+), neuronal stem cells and mesenchymal stem cells.

[0140] In one embodiment, stem cells are used in ex vivo procedures for cell transfection and gene therapy. The advantage to using stem cells is that they can be differentiated into other cell types in vitro, or can be introduced into a mammal (such as the donor of the cells) where they will engraft in the bone marrow. Methods for differentiating CD34+ cells in vitro into clinically important immune cell types using cytokines such a GM-CSF, IFN-gamma, and TNF-alpha are known (as a non-limiting example see, Inaba et al., J. Exp. Med. 176:1693-1702 (1992)). Stem cells are isolated for transduction and differentiation using known methods. For example, stem cells are isolated from bone marrow cells by panning the bone marrow cells with antibodies which bind unwanted cells, such as CD4+ and CD8+ (T cells), CD45+ (panB cells), GR-1 (granulocytes), and Tad (differentiated antigen presenting cells) (as a non-limiting example see Inaba et al. (1992) J. Exp. Med. 176:1693-1702). Stem cells that have been modified may also be used in some embodiments.

[0141] Any one of the RNA molecule compositions described herein is suitable for genome editing in post-mitotic cells or any cell which is not actively dividing, e.g., arrested cells. Examples of post-mitotic cells which may be edited using a composition of the present invention include, but are not limited to, a photoreceptor cell, a rod photoreceptor cell, a cone photoreceptor cell, a retinal pigment epithelium (RPE), a glial cell, Muller cell, and a ganglion.

[0142] Vectors (e.g., retroviruses, liposomes, etc.) containing therapeutic nucleic acid compositions can also be administered directly to an organism for transduction of cells in vivo. Administration is by any of the routes normally used for introducing a molecule into ultimate contact with blood or tissue cells including, but not limited to, injection, infusion, topical application (e.g., eye drops and cream) and electroporation. Suitable methods of administering such nucleic acids are available and well known to those of skill in the art, and, although more than one route can be used to administer a particular composition, a particular route can often provide a more immediate and more effective reaction than another route. According to some embodiments, the composition is delivered via sub-retinal injection. According to some embodiments, the composition is delivered via intravitreal injection.

[0143] Vectors suitable for introduction of transgenes into immune cells (e.g., T-cells) include non-integrating lentivirus vectors. See, e.g., U.S. Patent Publication No. 2009-0117617.

[0144] Pharmaceutically acceptable carriers are determined in part by the particular composition being administered, as well as by the particular method used to administer the composition. Accordingly, there is a wide variety of suitable formulations of pharmaceutical compositions available, as described below (See, e.g., Remington's Pharmaceutical Sciences, 17th ed., 1989).

[0145] In accordance with some embodiments, there is provided an RNA molecule which binds to associates with and/or directs the RNA guided DNA nuclease to a sequence comprising at least one nucleotide which differs between a mutated allele and a functional allele (e.g., SNP) of a gene of interest (i.e., a sequence of the mutated allele which is not present in the functional allele). The sequence may be within the disease associated mutation. The sequence may be upstream or downstream to the disease associated mutation. Any sequence difference between the mutated allele and the functional allele may be targeted by an RNA molecule of the present invention to inactivate the mutant allele, or otherwise disable its dominant disease-causing effects, while preserving the activity of the functional allele.

[0146] The disclosed compositions and methods may also be used in the manufacture of a medicament for treating dominant genetic disorders in a patient.

Examples of RNA Guide Sequences which Specifically Target Mutated Alleles of GUCY2D Gene

[0147] Although a large number of guide sequences can be designed to target a mutated allele, the nucleotide sequences described in Tables 2 identified by SEQ ID NOs: 1-3010 below were specifically selected to effectively implement the methods set forth herein and to effectively discriminate between alleles.

[0148] Referring to columns 1-4, each of SEQ ID NOs. 1-3010 indicated in column 1 corresponds to an engineered guide sequence. The corresponding SNP details are indicated in column 2. The SNP details indicated in the 2nd column include the assigned identifier for each SNP corresponding to a SNP ID indicated in Table 1. Column 3 indicates whether the target of each guide sequence is the GUCY2D gene polymorph or wild type (REF) sequence. Column 4 indicates the guanine-cytosine content of each guide sequence.

[0149] Table 2 shows guide sequences designed for use as described in the embodiments above to associate with different SNPs within a sequence of a mutated GUCY2D allele. Each engineered guide molecule is further designed such as to associate with a target genomic DNA sequence of interest that lies next to a protospacer adjacent motif (PAM), e.g., a PAM matching the sequence NGG or NAG, where “N” is any nucleobase. The guide sequences were designed to work in conjunction with one or more different CRISPR nucleases, including, but not limited to, e.g. SpCas9WT (PAM SEQ: NGG), SpCas9.VQR.1 (PAM SEQ: NGAN), SpCas9.VQR.2 (PAM SEQ: NGNG), SpCas9.EQR (PAM SEQ: NGAG), SpCas9.VRER (PAM SEQ: NGCG), SaCas9WT (PAM SEQ: NNGRRT), NmCas9WT (PAM SEQ: NNNNGATT), Cpf1(PAM SEQ: TTTV), or JeCas9WT (PAM SEQ: NNNVRYM). RNA molecules of the present invention are each designed to form complexes in conjunction with one or more different CRISPR nucleases and designed to target polynucleotide sequences of interest utilizing one or more different PAM sequences respective to the CRISPR nuclease utilized

TABLE 2
Guide sequences designed to associate
with specific SNPs of the GUCY2D gene

| SEQ ID | SNP ID | Target | % |
|---|---|---|---|
| NO: | (Table 1) | (SNP/REF) | GC |
| 1 | s1, s2, s3, s4 | REF, REF, REF, REF | 50% |
| 2 | s1, s2, s3, s4 | REF, REF, REF, REF | 50% |
| 3 | s1, s2, s3, s4 | REF, REF, REF, REF | 45% |
| 4 | s8 | BOTH | 40% |
| 5 | s8 | BOTH | 45% |
| 6 | s8 | BOTH | 40% |
| 7 | s9 | BOTH | 50% |
| 8 | s9 | BOTH | 55% |
| 9 | s9 | BOTH | 55% |
| 10 | s9 | BOTH | 45% |
| 11 | s11 | BOTH | 45% |
| 12 | s11 | BOTH | 45% |
| 13 | s12 | BOTH | 60% |
| 14 | s12 | BOTH | 50% |
| 15 | s15 | BOTH | 35% |
| 16 | s16 | BOTH | 65% |
| 17 | s16 | BOTH | 70% |
| 18 | s17 | BOTH | 65% |
| 19 | s17 | BOTH | 65% |
| 20 | s18 | BOTH | 60% |
| 21 | s20 | BOTH | 70% |
| 22 | s20 | BOTH | 70% |
| 23 | s21 | BOTH | 50% |
| 24 | s21 | BOTH | 65% |
| 25 | s21 | BOTH | 45% |
| 26 | s22 | BOTH | 45% |
| 27 | s22 | BOTH | 45% |
| 28 | s23 | BOTH | 60% |
| 29 | s23 | BOTH | 70% |
| 30 | s25 | BOTH | 75% |
| 31 | s25 | BOTH | 70% |
| 32 | s25 | BOTH | 70% |
| 33 | s27 | BOTH | 85% |
| 34 | s27 | BOTH | 85% |
| 35 | s27 | BOTH | 80% |
| 36 | s31 | BOTH | 55% |
| 37 | s32 | BOTH | 60% |
| 38 | s32 | BOTH | 70% |
| 39 | s33 | BOTH | 35% |
| 40 | s33 | BOTH | 40% |
| 41 | s34 | BOTH | 45% |
| 42 | s35 | BOTH | 90% |
| 43 | s35 | BOTH | 90% |
| 44 | s35 | BOTH | 80% |
| 45 | s36, s24 | REF, BOTH | 70% |
| 46 | s36, s24 | REF, BOTH | 70% |
| 47 | s36, s24 | REF, BOTH | 70% |
| 48 | s36, s24 | REF, REF | 75% |
| 49 | s36, s24 | REF, REF | 70% |
| 50 | s36, s24 | REF, REF | 75% |
| 51 | s36, s24 | REF, REF | 75% |
| 52 | s36, s24 | REF, REF | 75% |
| 53 | s36, s24 | REF, REF | 65% |
| 54 | s36, s24 | REF, REF | 70% |
| 55 | s36, s24 | REF, REF | 70% |
| 56 | s36, s24 | REF, REF | 70% |
| 57 | s36, s24 | REF, REF | 75% |
| 58 | s36, s24 | BOTH, REF | 60% |
| 59 | s36, s24 | BOTH, REF | 60% |
| 60 | s36, s24 | BOTH, REF | 65% |
| 61 | s29, s39 | REF, BOTH | 65% |
| 62 | s29, s39 | REF, REF | 70% |
| 63 | s29, s39 | REF, REF | 70% |
| 64 | s41 | BOTH | 55% |
| 65 | s41 | BOTH | 75% |
| 66 | s41 | BOTH | 60% |
| 67 | s42 | BOTH | 80% |
| 68 | s42 | BOTH | 60% |
| 69 | s42 | BOTH | 80% |
| 70 | s42 | BOTH | 75% |
| 71 | s2, s3, s4 | REF, BOTH, BOTH | 65% |
| 72 | s2, s3, s4 | REF, BOTH, BOTH | 65% |
| 73 | s2 | BOTH | 65% |
| 74 | s2 | BOTH | 70% |
| 75 | s45 | BOTH | 45% |
| 76 | s46 | BOTH | 60% |
| 77 | s46 | BOTH | 65% |
| 78 | s46 | BOTH | 55% |
| 79 | s47 | BOTH | 70% |
| 80 | s47 | BOTH | 50% |
| 81 | s47 | BOTH | 70% |
| 82 | s47 | BOTH | 70% |
| 83 | s47 | BOTH | 45% |
| 84 | s48 | BOTH | 65% |
| 85 | s49 | BOTH | 60% |
| 86 | s50 | BOTH | 70% |
| 87 | s50 | BOTH | 75% |
| 88 | s52 | BOTH | 65% |
| 89 | s52 | BOTH | 60% |
| 90 | s53 | BOTH | 50% |
| 91 | s53 | BOTH | 45% |
| 92 | s54 | BOTH | 55% |
| 93 | s54 | BOTH | 55% |
| 94 | s54 | BOTH | 55% |
| 95 | s55 | BOTH | 45% |
| 96 | s55 | BOTH | 50% |
| 97 | s56 | BOTH | 55% |
| 98 | s56 | BOTH | 65% |
| 99 | s56 | BOTH | 50% |
| 100 | s56 | BOTH | 65% |
| 101 | s57 | BOTH | 65% |
| 102 | s57 | BOTH | 45% |
| 103 | s58 | BOTH | 45% |
| 104 | s58 | BOTH | 40% |
| 105 | s59 | BOTH | 50% |
| 106 | s61 | BOTH | 55% |
| 107 | s61 | BOTH | 50% |
| 108 | s62 | BOTH | 55% |
| 109 | s62 | BOTH | 60% |
| 110 | s62 | BOTH | 50% |
| 111 | s63, s48 | REF, BOTH | 70% |
| 112 | s63, s48 | BOTH, REF | 65% |
| 113 | s63, s48 | REF, REF | 70% |
| 114 | s63, s48 | REF, REF | 60% |
| 115 | s63, s48 | REF, REF | 65% |
| 116 | s63, s48 | REF, REF | 70% |
| 117 | s63, s48 | REF, REF | 60% |
| 118 | s63, s48 | REF, REF | 70% |
| 119 | s63, s48 | REF, REF | 65% |
| 120 | s63, s48 | REF, REF | 55% |
| 121 | s63, s48 | REF, REF | 65% |
| 122 | s63, s48 | REF, REF | 55% |
| 123 | s63 | BOTH | 75% |
| 124 | s64, s17 | BOTH, REF | 45% |
| 125 | s64, s17 | REF, REF | 40% |
| 126 | s64, s17 | REF, REF | 45% |
| 127 | s64, s17 | REF, REF | 40% |
| 128 | s64, s17 | REF, REF | 40% |
| 129 | s64 | BOTH | 70% |
| 130 | s65 | BOTH | 65% |
| 131 | s65 | BOTH | 65% |
| 132 | s66 | BOTH | 65% |
| 133 | s67 | BOTH | 55% |
| 134 | s67 | BOTH | 40% |
| 135 | s67 | BOTH | 35% |
| 136 | s68 | BOTH | 35% |
| 137 | s68 | BOTH | 40% |
| 138 | s1 | SNP | 45% |
| 139 | s8 | REF | 45% |
| 140 | s8 | SNP | 50% |
| 141 | s8 | REF | 50% |
| 142 | s8 | SNP | 55% |
| 143 | s8 | SNP | 55% |
| 144 | s8 | REF | 40% |
| 145 | s8 | SNP | 45% |
| 146 | s8 | SNP | 65% |
| 147 | s8 | REF | 55% |
| 148 | s8 | SNP | 60% |
| 149 | s8 | REF | 40% |
| 150 | s8 | REF | 45% |
| 151 | s8 | SNP | 50% |
| 152 | s8 | SNP | 45% |
| 153 | s8 | REF | 40% |
| 154 | s9 | REF | 65% |
| 155 | s9 | SNP | 60% |
| 156 | s9 | REF | 60% |
| 157 | s9 | SNP | 55% |
| 158 | s9 | SNP | 60% |
| 159 | s9 | REF | 65% |
| 160 | s9 | REF | 70% |
| 161 | s9 | SNP | 65% |
| 162 | s9 | SNP | 60% |
| 163 | s9 | REF | 65% |
| 164 | s9 | SNP | 60% |
| 165 | s9 | REF | 65% |
| 166 | s9 | REF | 60% |
| 167 | s9 | SNP | 55% |
| 168 | s9 | REF | 65% |
| 169 | s9 | SNP | 60% |
| 170 | s9 | SNP | 60% |
| 171 | s9 | REF | 65% |
| 172 | s9 | SNP | 55% |
| 173 | s9 | REF | 60% |
| 174 | s9 | SNP | 55% |
| 175 | s9 | REF | 60% |
| 176 | s9 | SNP | 55% |
| 177 | s9 | REF | 60% |
| 178 | s9 | SNP | 55% |
| 179 | s9 | REF | 60% |
| 180 | s9 | SNP | 50% |
| 181 | s9 | REF | 55% |
| 182 | s70 | REF | 60% |
| 183 | s70 | SNP | 60% |
| 184 | s70 | SNP | 70% |
| 185 | s70 | SNP | 55% |
| 186 | s11 | SNP | 40% |
| 187 | s11 | REF | 35% |
| 188 | s11 | SNP | 50% |
| 189 | s11 | REF | 45% |
| 190 | s11 | REF | 40% |
| 191 | s11 | SNP | 45% |
| 192 | s11 | SNP | 35% |
| 193 | s11 | SNP | 35% |
| 194 | s12 | REF | 35% |
| 195 | s12 | SNP | 50% |
| 196 | s12 | REF | 50% |
| 197 | s12 | REF | 35% |
| 198 | s12 | SNP | 35% |
| 199 | s12 | REF | 35% |
| 200 | s12 | REF | 50% |
| 201 | s12 | SNP | 50% |
| 202 | s12 | REF | 50% |
| 203 | s12 | REF | 40% |
| 204 | s12 | SNP | 50% |
| 205 | s12 | REF | 50% |
| 206 | s12 | SNP | 40% |
| 207 | s12 | REF | 35% |
| 208 | s12 | REF | 40% |
| 209 | s12 | REF | 35% |
| 210 | s12 | SNP | 35% |
| 211 | s12 | SNP | 35% |
| 212 | s13 | REF | 35% |
| 213 | s13 | SNP | 40% |
| 214 | s13 | SNP | 35% |
| 215 | s14 | REF | 55% |
| 216 | s14 | SNP | 60% |
| 217 | s14 | SNP | 55% |
| 218 | s14 | REF | 65% |
| 219 | s14 | SNP | 70% |
| 220 | s14 | SNP | 60% |
| 221 | s14 | REF | 55% |
| 222 | s14 | REF | 70% |
| 223 | s15 | REF | 55% |
| 224 | s15 | SNP | 60% |
| 225 | s15 | SNP | 35% |
| 226 | s15 | REF | 35% |
| 227 | s15 | SNP | 40% |
| 228 | s15 | SNP | 40% |
| 229 | s15 | REF | 55% |
| 230 | s15 | SNP | 60% |
| 231 | s16 | SNP | 70% |
| 232 | s16 | REF | 75% |
| 233 | s16 | SNP | 65% |
| 234 | s16 | REF | 70% |
| 235 | s16 | SNP | 60% |
| 236 | s16 | REF | 65% |
| 237 | s16 | SNP | 60% |
| 238 | s16 | REF | 65% |
| 239 | s16 | REF | 85% |
| 240 | s16 | SNP | 80% |
| 241 | s16 | SNP | 65% |
| 242 | s16 | REF | 70% |
| 243 | s16 | SNP | 70% |
| 244 | s16 | REF | 75% |
| 245 | s16 | REF | 70% |
| 246 | s16 | SNP | 65% |
| 247 | s16 | REF | 70% |
| 248 | s16 | SNP | 65% |
| 249 | s16 | SNP | 65% |
| 250 | s16 | REF | 70% |
| 251 | s16 | REF | 70% |
| 252 | s16 | SNP | 65% |
| 253 | s16 | REF | 65% |
| 254 | s16 | SNP | 60% |
| 255 | s16 | SNP | 70% |
| 256 | s16 | REF | 75% |
| 257 | s16 | REF | 70% |
| 258 | s16 | SNP | 65% |
| 259 | s16 | SNP | 65% |
| 260 | s16 | REF | 70% |
| 261 | s16 | REF | 65% |
| 262 | s16 | SNP | 60% |
| 263 | s16 | SNP | 65% |
| 264 | s16 | REF | 70% |
| 265 | s17 | REF | 65% |
| 266 | s17 | REF | 50% |
| 267 | s17 | SNP | 50% |
| 268 | s17 | SNP | 50% |
| 269 | s17 | SNP | 45% |
| 270 | s17 | SNP | 45% |
| 271 | s17 | REF | 50% |
| 272 | s17 | SNP | 55% |
| 273 | s17 | SNP | 45% |
| 274 | s18 | REF | 60% |
| 275 | s18 | SNP | 65% |
| 276 | s18 | REF | 60% |
| 277 | s18 | SNP | 65% |
| 278 | s18 | SNP | 65% |
| 279 | s18 | REF | 60% |
| 280 | s18 | REF | 60% |
| 281 | s18 | SNP | 65% |
| 282 | s18 | SNP | 65% |
| 283 | s18 | SNP | 65% |
| 284 | s18 | REF | 60% |
| 285 | s18 | REF | 60% |
| 286 | s18 | SNP | 65% |
| 287 | s18 | SNP | 70% |
| 288 | s18 | SNP | 60% |
| 289 | s18 | SNP | 60% |
| 290 | s18 | REF | 55% |
| 291 | s19 | SNP | 55% |
| 292 | s19 | REF | 55% |
| 293 | s19 | REF | 50% |
| 294 | s19 | SNP | 50% |
| 295 | s19 | REF | 50% |
| 296 | s19 | SNP | 55% |
| 297 | s19 | REF | 55% |
| 298 | s19 | REF | 60% |
| 299 | s19 | REF | 45% |
| 300 | s19 | SNP | 45% |
| 301 | s19 | REF | 55% |
| 302 | s19 | SNP | 60% |
| 303 | s19 | SNP | 55% |
| 304 | s19 | SNP | 50% |
| 305 | s19 | REF | 50% |
| 306 | s19 | SNP | 50% |
| 307 | s19 | REF | 55% |
| 308 | s19 | REF | 55% |
| 309 | s19 | REF | 45% |
| 310 | s19 | SNP | 45% |
| 311 | s19 | SNP | 50% |
| 312 | s19 | REF | 50% |
| 313 | s20 | REF | 60% |
| 314 | s20 | SNP | 65% |
| 315 | s20 | REF | 60% |
| 316 | s20 | SNP | 70% |
| 317 | s20 | REF | 65% |
| 318 | s20 | SNP | 70% |
| 319 | s20 | REF | 65% |
| 320 | s20 | REF | 60% |
| 321 | s20 | REF | 60% |
| 322 | s20 | SNP | 70% |
| 323 | s20 | SNP | 65% |
| 324 | s20 | REF | 65% |
| 325 | s20 | SNP | 70% |
| 326 | s20 | SNP | 70% |
| 327 | s20 | REF | 65% |
| 328 | s20 | REF | 65% |
| 329 | s20 | REF | 60% |
| 330 | s20 | SNP | 65% |
| 331 | s20 | REF | 65% |
| 332 | s20 | SNP | 70% |
| 333 | s21 | REF | 45% |
| 334 | s21 | SNP | 50% |
| 335 | s21 | REF | 45% |
| 336 | s21 | SNP | 50% |
| 337 | s21 | SNP | 50% |
| 338 | s21 | REF | 45% |
| 339 | s21 | REF | 45% |
| 340 | s21 | SNP | 50% |
| 341 | s21 | REF | 50% |
| 342 | s21 | SNP | 55% |
| 343 | s21 | SNP | 50% |
| 344 | s21 | REF | 45% |
| 345 | s21 | SNP | 45% |
| 346 | s21 | REF | 40% |
| 347 | s22 | REF | 45% |
| 348 | s22 | SNP | 40% |
| 349 | s22 | SNP | 45% |
| 350 | s22 | SNP | 45% |
| 351 | s22 | REF | 50% |
| 352 | s22 | REF | 50% |
| 353 | s22 | SNP | 45% |
| 354 | s22 | REF | 55% |
| 355 | s22 | REF | 50% |
| 356 | s22 | SNP | 45% |
| 357 | s22 | REF | 50% |
| 358 | s22 | REF | 50% |
| 359 | s22 | SNP | 50% |
| 360 | s22 | REF | 50% |
| 361 | s23 | SNP | 55% |
| 362 | s23 | SNP | 55% |
| 363 | s23 | REF | 60% |
| 364 | s23 | SNP | 60% |
| 365 | s23 | REF | 65% |
| 366 | s23 | SNP | 60% |
| 367 | s23 | SNP | 60% |
| 368 | s23 | SNP | 60% |
| 369 | s23 | REF | 65% |
| 370 | s23 | REF | 60% |
| 371 | s23 | SNP | 55% |
| 372 | s23 | REF | 60% |
| 373 | s23 | SNP | 55% |
| 374 | s23 | SNP | 60% |
| 375 | s23 | SNP | 55% |
| 376 | s23 | SNP | 55% |
| 377 | s23 | REF | 60% |
| 378 | s23 | REF | 60% |
| 379 | s23 | SNP | 55% |
| 380 | s39 | SNP | 65% |
| 381 | s39 | SNP | 70% |
| 382 | s39 | SNP | 70% |
| 383 | s39 | SNP | 70% |
| 384 | s39 | SNP | 75% |
| 385 | s39 | SNP | 70% |
| 386 | s39 | SNP | 65% |
| 387 | s24 | SNP | 70% |
| 388 | s24 | SNP | 60% |
| 389 | s24 | SNP | 65% |
| 390 | s24 | REF | 65% |
| 391 | s24 | SNP | 70% |
| 392 | s24 | SNP | 70% |
| 393 | s24 | SNP | 60% |
| 394 | s24 | SNP | 55% |
| 395 | s24 | SNP | 65% |
| 396 | s24 | SNP | 55% |
| 397 | s24 | SNP | 60% |
| 398 | s24 | SNP | 65% |
| 399 | s24 | SNP | 70% |
| 400 | s25 | SNP | 55% |
| 401 | s25 | REF | 60% |
| 402 | s25 | REF | 45% |
| 403 | s25 | SNP | 40% |
| 404 | s25 | REF | 65% |
| 405 | s25 | SNP | 60% |
| 406 | s25 | REF | 70% |
| 407 | s25 | SNP | 55% |
| 408 | s25 | REF | 60% |
| 409 | s25 | SNP | 65% |
| 410 | s25 | SNP | 65% |
| 411 | s25 | REF | 70% |
| 412 | s25 | REF | 75% |
| 413 | s25 | REF | 65% |
| 414 | s25 | SNP | 60% |
| 415 | s25 | REF | 50% |
| 416 | s25 | SNP | 45% |
| 417 | s25 | REF | 60% |
| 418 | s25 | SNP | 55% |
| 419 | s25 | REF | 60% |
| 420 | s25 | SNP | 55% |
| 421 | s25 | REF | 65% |
| 422 | s25 | SNP | 60% |
| 423 | s25 | SNP | 70% |
| 424 | s26 | SNP | 35% |
| 425 | s26 | REF | 35% |
| 426 | s26 | SNP | 35% |
| 427 | s26 | REF | 35% |
| 428 | s26 | SNP | 35% |
| 429 | s26 | SNP | 35% |
| 430 | s26 | REF | 35% |
| 431 | s26 | REF | 35% |
| 432 | s26 | SNP | 35% |
| 433 | s26 | REF | 40% |
| 434 | s26 | REF | 35% |
| 435 | s26 | REF | 35% |
| 436 | s73 | SNP | 50% |
| 437 | s27 | REF | 80% |
| 438 | s27 | REF | 80% |
| 439 | s27 | SNP | 85% |
| 440 | s27 | REF | 75% |
| 441 | s27 | SNP | 80% |
| 442 | s27 | REF | 80% |
| 443 | s27 | REF | 75% |
| 444 | s27 | SNP | 80% |
| 445 | s27 | REF | 80% |
| 446 | s27 | SNP | 85% |
| 447 | s27 | SNP | 85% |
| 448 | s27 | SNP | 80% |
| 449 | s27 | SNP | 85% |
| 450 | s27 | REF | 80% |
| 451 | s27 | REF | 75% |
| 452 | s27 | SNP | 85% |
| 453 | s27 | REF | 80% |
| 454 | s27 | REF | 80% |
| 455 | s27 | SNP | 85% |
| 456 | s27 | SNP | 85% |
| 457 | s27 | SNP | 80% |
| 458 | s27 | REF | 75% |
| 459 | s27 | REF | 80% |
| 460 | s27 | SNP | 85% |
| 461 | s27 | REF | 75% |
| 462 | s27 | SNP | 85% |
| 463 | s27 | REF | 80% |
| 464 | s27 | REF | 80% |
| 465 | s27 | SNP | 85% |
| 466 | s4 | SNP | 45% |
| 467 | s4 | SNP | 45% |
| 468 | s4 | SNP | 40% |
| 469 | s28 | REF | 70% |
| 470 | s28 | SNP | 65% |
| 471 | s28 | SNP | 65% |
| 472 | s28 | REF | 70% |
| 473 | s28 | SNP | 65% |
| 474 | s28 | REF | 70% |
| 475 | s28 | SNP | 65% |
| 476 | s28 | SNP | 65% |
| 477 | s28 | REF | 70% |
| 478 | s28 | SNP | 65% |
| 479 | s28 | SNP | 65% |
| 480 | s28 | SNP | 65% |
| 481 | s28 | SNP | 65% |
| 482 | s28 | SNP | 65% |
| 483 | s28 | REF | 70% |
| 484 | s3 | SNP | 45% |
| 485 | s3 | SNP | 45% |
| 486 | s3 | SNP | 40% |
| 487 | s30 | REF | 45% |
| 488 | s30 | SNP | 50% |
| 489 | s30 | REF | 35% |
| 490 | s30 | SNP | 40% |
| 491 | s30 | REF | 50% |
| 492 | s30 | SNP | 55% |
| 493 | s30 | REF | 40% |
| 494 | s30 | SNP | 45% |
| 495 | s30 | SNP | 40% |
| 496 | s30 | REF | 35% |
| 497 | s30 | SNP | 45% |
| 498 | s30 | REF | 40% |
| 499 | s31 | REF | 70% |
| 500 | s31 | REF | 50% |
| 501 | s31 | SNP | 55% |
| 502 | s31 | REF | 65% |
| 503 | s31 | SNP | 70% |
| 504 | s31 | SNP | 75% |
| 505 | s31 | REF | 50% |
| 506 | s31 | SNP | 55% |
| 507 | s31 | REF | 75% |
| 508 | s31 | SNP | 55% |
| 509 | s31 | REF | 50% |
| 510 | s31 | SNP | 55% |
| 511 | s31 | REF | 50% |
| 512 | s31 | REF | 70% |
| 513 | s31 | REF | 65% |
| 514 | s31 | SNP | 70% |
| 515 | s31 | REF | 55% |
| 516 | s31 | SNP | 60% |
| 517 | s31 | REF | 65% |
| 518 | s31 | SNP | 70% |
| 519 | s31 | SNP | 70% |
| 520 | s31 | SNP | 70% |
| 521 | s31 | REF | 65% |
| 522 | s31 | SNP | 75% |
| 523 | s31 | REF | 70% |
| 524 | s31 | REF | 60% |
| 525 | s31 | SNP | 65% |
| 526 | s31 | REF | 65% |
| 527 | s31 | REF | 50% |
| 528 | s31 | REF | 55% |
| 529 | s31 | SNP | 60% |
| 530 | s32 | SNP | 60% |
| 531 | s32 | SNP | 65% |
| 532 | s32 | SNP | 70% |
| 533 | s32 | REF | 75% |
| 534 | s32 | SNP | 65% |
| 535 | s32 | REF | 75% |
| 536 | s32 | SNP | 65% |
| 537 | s32 | REF | 70% |
| 538 | s32 | REF | 70% |
| 539 | s32 | SNP | 65% |
| 540 | s32 | SNP | 65% |
| 541 | s32 | REF | 70% |
| 542 | s32 | SNP | 65% |
| 543 | s32 | REF | 70% |
| 544 | s32 | REF | 75% |
| 545 | s74 | SNP | 65% |
| 546 | s74 | SNP | 65% |
| 547 | s74 | SNP | 65% |
| 548 | s33 | REF | 50% |
| 549 | s33 | SNP | 55% |
| 550 | s33 | REF | 40% |
| 551 | s33 | SNP | 45% |
| 552 | s33 | REF | 55% |
| 553 | s33 | SNP | 60% |
| 554 | s33 | REF | 40% |
| 555 | s33 | REF | 45% |
| 556 | s33 | REF | 60% |
| 557 | s33 | SNP | 65% |
| 558 | s33 | SNP | 65% |
| 559 | s33 | REF | 60% |
| 560 | s33 | SNP | 50% |
| 561 | s33 | SNP | 60% |
| 562 | s33 | REF | 55% |
| 563 | s33 | REF | 40% |
| 564 | s33 | SNP | 45% |
| 565 | s33 | SNP | 60% |
| 566 | s33 | REF | 55% |
| 567 | s33 | REF | 35% |
| 568 | s33 | SNP | 40% |
| 569 | s33 | SNP | 55% |
| 570 | s33 | REF | 50% |
| 571 | s33 | SNP | 60% |
| 572 | s33 | REF | 55% |
| 573 | s34 | SNP | 35% |
| 574 | s34 | REF | 50% |
| 575 | s34 | SNP | 45% |
| 576 | s34 | SNP | 50% |
| 577 | s34 | REF | 55% |
| 578 | s34 | SNP | 50% |
| 579 | s34 | REF | 55% |
| 580 | s34 | REF | 50% |
| 581 | s34 | SNP | 45% |
| 582 | s34 | REF | 50% |
| 583 | s34 | SNP | 45% |
| 584 | s35 | SNP | 70% |
| 585 | s35 | REF | 75% |
| 586 | s35 | REF | 75% |
| 587 | s35 | SNP | 70% |
| 588 | s35 | SNP | 70% |
| 589 | s35 | REF | 75% |
| 590 | s35 | REF | 85% |
| 591 | s35 | SNP | 80% |
| 592 | s35 | SNP | 75% |
| 593 | s35 | REF | 80% |
| 594 | s35 | REF | 75% |
| 595 | s35 | SNP | 70% |
| 596 | s35 | SNP | 85% |
| 597 | s35 | REF | 90% |
| 598 | s35 | REF | 85% |
| 599 | s35 | SNP | 80% |
| 600 | s35 | REF | 80% |
| 601 | s35 | SNP | 75% |
| 602 | s35 | SNP | 80% |
| 603 | s35 | REF | 85% |
| 604 | s35 | SNP | 70% |
| 605 | s35 | REF | 75% |
| 606 | s35 | REF | 75% |
| 607 | s35 | SNP | 70% |
| 608 | s35 | SNP | 80% |
| 609 | s35 | REF | 85% |
| 610 | s35 | SNP | 75% |
| 611 | s35 | REF | 80% |
| 612 | s35 | REF | 75% |
| 613 | s35 | SNP | 70% |
| 614 | s35 | SNP | 80% |
| 615 | s35 | REF | 85% |
| 616 | s35 | REF | 80% |
| 617 | s35 | SNP | 75% |
| 618 | s35 | REF | 80% |
| 619 | s35 | SNP | 75% |
| 620 | s35 | REF | 75% |
| 621 | s35 | SNP | 70% |
| 622 | s36 | SNP | 60% |
| 623 | s36 | REF | 65% |
| 624 | s36 | SNP | 70% |
| 625 | s36 | SNP | 65% |
| 626 | s36 | REF | 70% |
| 627 | s36 | SNP | 65% |
| 628 | s36 | SNP | 70% |
| 629 | s36 | SNP | 70% |
| 630 | s36 | SNP | 70% |
| 631 | s36 | SNP | 65% |
| 632 | s36 | SNP | 60% |
| 633 | s36 | REF | 65% |
| 634 | s36 | SNP | 65% |
| 635 | s36 | SNP | 65% |
| 636 | s36 | SNP | 65% |
| 637 | s36 | SNP | 65% |
| 638 | s36 | SNP | 65% |
| 639 | s36 | SNP | 70% |
| 640 | s29 | SNP | 70% |
| 641 | s29 | SNP | 70% |
| 642 | s29 | SNP | 75% |
| 643 | s29 | SNP | 75% |
| 644 | s29 | SNP | 65% |
| 645 | s29 | REF | 65% |
| 646 | s40 | SNP | 40% |
| 647 | s41 | SNP | 55% |
| 648 | s41 | REF | 60% |
| 649 | s41 | SNP | 65% |
| 650 | s41 | REF | 70% |
| 651 | s41 | REF | 75% |
| 652 | s41 | SNP | 70% |
| 653 | s41 | SNP | 60% |
| 654 | s41 | REF | 65% |
| 655 | s41 | REF | 60% |
| 656 | s41 | SNP | 65% |
| 657 | s41 | REF | 70% |
| 658 | s41 | SNP | 75% |
| 659 | s41 | REF | 80% |
| 660 | s41 | SNP | 55% |
| 661 | s41 | REF | 65% |
| 662 | s41 | SNP | 60% |
| 663 | s41 | SNP | 60% |
| 664 | s41 | REF | 65% |
| 665 | s41 | SNP | 55% |
| 666 | s41 | REF | 60% |
| 667 | s41 | SNP | 75% |
| 668 | s41 | REF | 80% |
| 669 | s42 | SNP | 65% |
| 670 | s42 | REF | 80% |
| 671 | s42 | SNP | 65% |
| 672 | s42 | SNP | 65% |
| 673 | s42 | REF | 70% |
| 674 | s42 | REF | 65% |
| 675 | s42 | SNP | 60% |
| 676 | s2 | SNP | 60% |
| 677 | s45 | SNP | 40% |
| 678 | s45 | REF | 45% |
| 679 | s45 | SNP | 40% |
| 680 | s45 | REF | 45% |
| 681 | s45 | SNP | 50% |
| 682 | s45 | REF | 55% |
| 683 | s45 | REF | 45% |
| 684 | s45 | SNP | 40% |
| 685 | s45 | REF | 45% |
| 686 | s76 | SNP | 50% |
| 687 | s76 | SNP | 50% |
| 688 | s46 | REF | 65% |
| 689 | s46 | SNP | 60% |
| 690 | s46 | REF | 65% |
| 691 | s46 | REF | 70% |
| 692 | s46 | SNP | 65% |
| 693 | s46 | SNP | 70% |
| 694 | s46 | REF | 75% |
| 695 | s46 | SNP | 65% |
| 696 | s46 | REF | 70% |
| 697 | s46 | SNP | 65% |
| 698 | s46 | REF | 70% |
| 699 | s46 | REF | 65% |
| 700 | s46 | SNP | 60% |
| 701 | s47 | SNP | 50% |
| 702 | s47 | SNP | 55% |
| 703 | s47 | REF | 80% |
| 704 | s47 | REF | 60% |
| 705 | s47 | SNP | 70% |
| 706 | s47 | REF | 75% |
| 707 | s47 | SNP | 65% |
| 708 | s47 | REF | 70% |
| 709 | s47 | REF | 65% |
| 710 | s47 | SNP | 60% |
| 711 | s47 | SNP | 75% |
| 712 | s47 | REF | 55% |
| 713 | s47 | REF | 60% |
| 714 | s47 | SNP | 55% |
| 715 | s48 | SNP | 55% |
| 716 | s48 | SNP | 65% |
| 717 | s48 | SNP | 65% |
| 718 | s48 | SNP | 65% |
| 719 | s48 | REF | 70% |
| 720 | s48 | REF | 70% |
| 721 | s48 | SNP | 65% |
| 722 | s48 | REF | 70% |
| 723 | s48 | SNP | 60% |
| 724 | s48 | REF | 70% |
| 725 | s48 | SNP | 55% |
| 726 | s48 | SNP | 60% |
| 727 | s48 | REF | 70% |
| 728 | s48 | REF | 70% |
| 729 | s48 | SNP | 65% |
| 730 | s48 | SNP | 50% |
| 731 | s48 | SNP | 50% |
| 732 | s48 | SNP | 60% |
| 733 | s48 | SNP | 65% |
| 734 | s49 | SNP | 55% |
| 735 | s49 | REF | 50% |
| 736 | s49 | SNP | 55% |
| 737 | s49 | REF | 50% |
| 738 | s49 | REF | 50% |
| 739 | s49 | SNP | 55% |
| 740 | s49 | REF | 50% |
| 741 | s49 | REF | 55% |
| 742 | s49 | SNP | 60% |
| 743 | s1, s2, s3, s4 | BOTH, REF, REF, BOTH | 60% |
| 744 | s1, s2, s3, s4 | BOTH, REF, BOTH, BOTH | 60% |
| 745 | s1, s2, s3, s4 | BOTH, REF, REF, REF | 55% |
| 746 | s1, s2, s3, s4 | BOTH, REF, REF, REF | 60% |
| 747 | s1, s2, s3, s4 | REF, REF, REF, REF | 45% |
| 748 | s1, s2, s3, s4 | REF, REF, REF, REF | 50% |
| 749 | s1, s2, s3, s4 | REF, REF, REF, REF | 55% |
| 750 | s1, s2, s3, s4 | REF, REF, REF, REF | 45% |
| 751 | s1, s2, s3, s4 | REF, REF, REF, REF | 55% |
| 752 | s5, s6 | REF, BOTH | 40% |
| 753 | s5, s6 | REF, BOTH | 40% |
| 754 | s5, s6 | REF, BOTH | 35% |
| 755 | s5, s6 | REF, BOTH | 35% |
| 756 | s5, s6 | REF, BOTH | 35% |
| 757 | s5, s6 | REF, BOTH | 35% |
| 758 | s5, s6 | REF, BOTH | 35% |
| 759 | s5, s6, s7 | REF, BOTH, BOTH | 35% |
| 760 | s5, s6, s7 | REF, BOTH, BOTH | 40% |
| 761 | s8 | BOTH | 40% |
| 762 | s8 | BOTH | 50% |
| 763 | s8 | BOTH | 40% |
| 764 | s9 | BOTH | 60% |
| 765 | s9 | BOTH | 50% |
| 766 | s9 | BOTH | 55% |
| 767 | s9 | BOTH | 50% |
| 768 | s10 | BOTH | 70% |
| 769 | s10 | BOTH | 65% |
| 770 | s10 | BOTH | 65% |
| 771 | s10 | BOTH | 65% |
| 772 | s11 | BOTH | 50% |
| 773 | s11 | BOTH | 45% |
| 774 | s12 | BOTH | 55% |
| 775 | s12 | BOTH | 45% |
| 776 | s12 | BOTH | 45% |
| 777 | s12 | BOTH | 40% |
| 778 | s12 | BOTH | 60% |
| 779 | s12 | BOTH | 60% |
| 780 | s13 | BOTH | 45% |
| 781 | s13 | BOTH | 50% |
| 782 | s13 | BOTH | 50% |
| 783 | s13 | BOTH | 35% |
| 784 | s14 | BOTH | 65% |
| 785 | s14 | BOTH | 60% |
| 786 | s14 | BOTH | 50% |
| 787 | s15 | BOTH | 35% |
| 788 | s15 | BOTH | 40% |
| 789 | s16 | BOTH | 65% |
| 790 | s16 | BOTH | 70% |
| 791 | s16 | BOTH | 80% |
| 792 | s18 | BOTH | 55% |
| 793 | s18 | BOTH | 55% |
| 794 | s18 | BOTH | 60% |
| 795 | s19 | BOTH | 55% |
| 796 | s19 | BOTH | 55% |
| 797 | s19 | BOTH | 60% |
| 798 | s19 | BOTH | 60% |
| 799 | s20 | BOTH | 70% |
| 800 | s20 | BOTH | 65% |
| 801 | s21 | BOTH | 55% |
| 802 | s21 | BOTH | 60% |
| 803 | s21 | BOTH | 50% |
| 804 | s21 | BOTH | 45% |
| 805 | s22 | BOTH | 50% |
| 806 | s22 | BOTH | 55% |
| 807 | s22 | BOTH | 50% |
| 808 | s22 | BOTH | 50% |
| 809 | s22 | BOTH | 50% |
| 810 | s22 | BOTH | 50% |
| 811 | s23 | BOTH | 60% |
| 812 | s23 | BOTH | 60% |
| 813 | s23 | BOTH | 70% |
| 814 | s23 | BOTH | 65% |
| 815 | s24 | BOTH | 60% |
| 816 | s24 | BOTH | 60% |
| 817 | s24 | BOTH | 60% |
| 818 | s24 | BOTH | 60% |
| 819 | s25 | BOTH | 50% |
| 820 | s25 | BOTH | 50% |
| 821 | s25 | BOTH | 75% |
| 822 | s25 | BOTH | 50% |
| 823 | s25 | BOTH | 50% |
| 824 | s26 | BOTH | 40% |
| 825 | s26 | BOTH | 40% |
| 826 | s26 | BOTH | 40% |
| 827 | s26 | BOTH | 45% |
| 828 | s27 | BOTH | 80% |
| 829 | s27 | BOTH | 85% |
| 830 | s27 | BOTH | 80% |
| 831 | s27 | BOTH | 85% |
| 832 | s27 | BOTH | 80% |
| 833 | s28 | BOTH | 65% |
| 834 | s28 | BOTH | 70% |
| 835 | s28, s29 | BOTH, REF | 65% |
| 836 | s28, s29 | REF, BOTH | 70% |
| 837 | s30 | BOTH | 60% |
| 838 | s30 | BOTH | 60% |
| 839 | s30 | BOTH | 65% |
| 840 | s30 | BOTH | 35% |
| 841 | s30 | BOTH | 60% |
| 842 | s31 | BOTH | 50% |
| 843 | s31 | BOTH | 75% |
| 844 | s31 | BOTH | 50% |
| 845 | s32 | BOTH | 70% |
| 846 | s32 | BOTH | 70% |
| 847 | s32 | BOTH | 70% |
| 848 | s32 | BOTH | 60% |
| 849 | s33 | BOTH | 35% |
| 850 | s33 | BOTH | 35% |
| 851 | s34 | BOTH | 45% |
| 852 | s34 | BOTH | 45% |
| 853 | s34 | BOTH | 45% |
| 854 | s35 | BOTH | 90% |
| 855 | s35 | BOTH | 75% |
| 856 | s35 | BOTH | 80% |
| 857 | s35 | BOTH | 80% |
| 858 | s35 | BOTH | 85% |
| 859 | s36, s24 | REF, BOTH | 65% |
| 860 | s36, s24 | REF, REF | 70% |
| 861 | s36, s24 | REF, REF | 65% |
| 862 | s36, s24 | REF, REF | 75% |
| 863 | s36, s24 | REF, REF | 65% |
| 864 | s36, s24 | REF, REF | 70% |
| 865 | s36, s24 | REF, REF | 75% |
| 866 | s36, s24 | REF, REF | 65% |
| 867 | s36, s24 | REF, REF | 75% |
| 868 | s36, s24 | REF, REF | 65% |
| 869 | s36, s24 | REF, REF | 75% |
| 870 | s36, s24 | REF, REF | 75% |
| 871 | s36, s24 | REF, REF | 60% |
| 872 | s36, s24 | REF, REF | 60% |
| 873 | s36, s24 | REF, REF | 65% |
| 874 | s36, s24 | BOTH, REF | 60% |
| 875 | s36 | BOTH | 60% |
| 876 | s36 | BOTH | 60% |
| 877 | s36 | BOTH | 60% |
| 878 | s36 | BOTH | 65% |
| 879 | s7, s37 | SNP, SNP | 50% |
| 880 | s7, s38 | SNP, SNP | 50% |
| 881 | s29, s39 | REF, BOTH | 65% |
| 882 | s29, s39 | REF, BOTH | 65% |
| 883 | s29, s39 | REF, REF | 65% |
| 884 | s29, s39 | REF, REF | 75% |
| 885 | s29, s39 | REF, REF | 75% |
| 886 | s29, s39 | REF, REF | 75% |
| 887 | s29, s39 | REF, REF | 75% |
| 888 | s29 | BOTH | 70% |
| 889 | s29 | BOTH | 70% |
| 890 | s40 | BOTH | 40% |
| 891 | s40 | BOTH | 45% |
| 892 | s40 | BOTH | 45% |
| 893 | s40 | BOTH | 40% |
| 894 | s41 | BOTH | 75% |
| 895 | s41 | BOTH | 60% |
| 896 | s41 | BOTH | 80% |
| 897 | s41 | BOTH | 75% |
| 898 | s41 | BOTH | 60% |
| 899 | s42 | BOTH | 55% |
| 900 | s42 | BOTH | 80% |
| 901 | s43 | BOTH | 50% |
| 902 | s43 | BOTH | 55% |
| 903 | s43 | BOTH | 55% |
| 904 | s43 | BOTH | 60% |
| 905 | s43 | BOTH | 55% |
| 906 | s43 | BOTH | 60% |
| 907 | s44 | BOTH | 50% |
| 908 | s44 | BOTH | 55% |
| 909 | s44 | BOTH | 50% |
| 910 | s44 | BOTH | 55% |
| 911 | s2, s3, s4 | REF, REF, REF | 40% |
| 912 | s2, s3, s4 | REF, REF, REF | 35% |
| 913 | s2, s3, s4 | REF, REF, REF | 50% |
| 914 | s2, s3, s4 | REF, REF, REF | 60% |
| 915 | s2, s3, s4 | REF, REF, REF | 55% |
| 916 | s2, s3 | BOTH, BOTH | 65% |
| 917 | s2, s3 | REF, REF | 60% |
| 918 | s2 | BOTH | 65% |
| 919 | s45 | BOTH | 50% |
| 920 | s45 | BOTH | 50% |
| 921 | s45 | BOTH | 45% |
| 922 | s45 | BOTH | 45% |
| 923 | s45 | BOTH | 40% |
| 924 | s45 | BOTH | 45% |
| 925 | s46 | BOTH | 65% |
| 926 | s46 | BOTH | 55% |
| 927 | s46 | BOTH | 65% |
| 928 | s46 | BOTH | 65% |
| 929 | s46 | BOTH | 55% |
| 930 | s47 | BOTH | 50% |
| 931 | s47 | BOTH | 70% |
| 932 | s47 | BOTH | 45% |
| 933 | s48 | BOTH | 70% |
| 934 | s49 | BOTH | 60% |
| 935 | s49 | BOTH | 60% |
| 936 | s49 | BOTH | 60% |
| 937 | s49 | BOTH | 60% |
| 938 | s50 | BOTH | 75% |
| 939 | s50 | BOTH | 70% |
| 940 | s50 | BOTH | 70% |
| 941 | s50 | BOTH | 80% |
| 942 | s50 | BOTH | 70% |
| 943 | s51 | BOTH | 60% |
| 944 | s51 | BOTH | 75% |
| 945 | s51 | BOTH | 75% |
| 946 | s52 | BOTH | 80% |
| 947 | s52 | BOTH | 70% |
| 948 | s52 | BOTH | 80% |
| 949 | s52 | BOTH | 65% |
| 950 | s52 | BOTH | 75% |
| 951 | s53 | BOTH | 80% |
| 952 | s53 | BOTH | 50% |
| 953 | s53 | BOTH | 80% |
| 954 | s54 | BOTH | 75% |
| 955 | s54 | BOTH | 60% |
| 956 | s54 | BOTH | 70% |
| 957 | s54 | BOTH | 75% |
| 958 | s54 | BOTH | 70% |
| 959 | s55 | BOTH | 45% |
| 960 | s55 | BOTH | 55% |
| 961 | s55 | BOTH | 55% |
| 962 | s55 | BOTH | 55% |
| 963 | s55 | BOTH | 55% |
| 964 | s55 | BOTH | 50% |
| 965 | s56 | BOTH | 60% |
| 966 | s56 | BOTH | 60% |
| 967 | s56 | BOTH | 70% |
| 968 | s56 | BOTH | 50% |
| 969 | s57 | BOTH | 40% |
| 970 | s57 | BOTH | 45% |
| 971 | s57 | BOTH | 60% |
| 972 | s57 | BOTH | 60% |
| 973 | s57 | BOTH | 45% |
| 974 | s58 | BOTH | 45% |
| 975 | s58 | BOTH | 50% |
| 976 | s58 | BOTH | 50% |
| 977 | s58 | BOTH | 50% |
| 978 | s58 | BOTH | 40% |
| 979 | s58 | BOTH | 40% |
| 980 | s59 | BOTH | 50% |
| 981 | s59 | BOTH | 45% |
| 982 | s59 | BOTH | 40% |
| 983 | s60 | BOTH | 45% |
| 984 | s60 | BOTH | 45% |
| 985 | s60 | BOTH | 55% |
| 986 | s60 | BOTH | 60% |
| 987 | s60 | BOTH | 50% |
| 988 | s60 | BOTH | 50% |
| 989 | s61 | BOTH | 45% |
| 990 | s61 | BOTH | 50% |
| 991 | s61 | BOTH | 45% |
| 992 | s61 | BOTH | 55% |
| 993 | s61 | BOTH | 50% |
| 994 | s62 | BOTH | 50% |
| 995 | s62 | BOTH | 60% |
| 996 | s62 | BOTH | 50% |
| 997 | s62 | BOTH | 55% |
| 998 | s62 | BOTH | 55% |
| 999 | s63, s48 | REF, BOTH | 70% |
| 1000 | s63, s48 | REF, BOTH | 70% |
| 1001 | s63, s48 | REF, BOTH | 65% |
| 1002 | s63, s48 | BOTH, REF | 60% |
| 1003 | s63, s48 | BOTH, REF | 65% |
| 1004 | s63, s48 | BOTH, REF | 65% |
| 1005 | s63, s48 | REF, REF | 70% |
| 1006 | s63, s48 | REF, REF | 70% |
| 1007 | s63, s48 | REF, REF | 65% |
| 1008 | s63, s48 | REF, REF | 70% |
| 1009 | s63, s48 | REF, REF | 60% |
| 1010 | s63, s48 | REF, REF | 70% |
| 1011 | s63, s48 | REF, REF | 60% |
| 1012 | s63, s48 | REF, REF | 70% |
| 1013 | s63, s48 | REF, REF | 60% |
| 1014 | s63, s48 | REF, REF | 60% |
| 1015 | s63, s48 | REF, REF | 65% |
| 1016 | s63, s48 | REF, REF | 65% |
| 1017 | s63 | BOTH | 75% |
| 1018 | s64, s17 | REF, BOTH | 45% |
| 1019 | s64, s17 | REF, BOTH | 50% |
| 1020 | s64, s17 | REF, BOTH | 50% |
| 1021 | s64, s17 | REF, BOTH | 45% |
| 1022 | s64, s17 | BOTH, REF | 45% |
| 1023 | s64, s17 | BOTH, REF | 40% |
| 1024 | s64, s17 | REF, REF | 40% |
| 1025 | s64, s17 | REF, REF | 35% |
| 1026 | s64, s17 | REF, REF | 40% |
| 1027 | s64, s17 | REF, REF | 40% |
| 1028 | s64, s17 | REF, REF | 40% |
| 1029 | s64, s17 | REF, REF | 40% |
| 1030 | s64, s17 | REF, REF | 40% |
| 1031 | s64, s17 | REF, REF | 40% |
| 1032 | s64, s17 | REF, REF | 40% |
| 1033 | s64, s17 | REF, REF | 40% |
| 1034 | s64, s17 | REF, REF | 40% |
| 1035 | s64, s17 | REF, REF | 35% |
| 1036 | s64, s17 | REF, REF | 40% |
| 1037 | s64 | BOTH | 70% |
| 1038 | s65 | BOTH | 65% |
| 1039 | s65 | BOTH | 65% |
| 1040 | s66 | BOTH | 65% |
| 1041 | s66 | BOTH | 65% |
| 1042 | s66 | BOTH | 45% |
| 1043 | s66 | BOTH | 50% |
| 1044 | s66 | BOTH | 65% |
| 1045 | s66 | BOTH | 55% |
| 1046 | s67 | BOTH | 35% |
| 1047 | s67 | BOTH | 40% |
| 1048 | s67 | BOTH | 50% |
| 1049 | s67 | BOTH | 60% |
| 1050 | s67 | BOTH | 55% |
| 1051 | s68 | BOTH | 50% |
| 1052 | s68 | BOTH | 40% |
| 1053 | s68 | BOTH | 50% |
| 1054 | s1 | SNP | 45% |
| 1055 | s1 | SNP | 50% |
| 1056 | s1 | SNP | 45% |
| 1057 | s1 | SNP | 50% |
| 1058 | s5 | SNP | 40% |
| 1059 | s5 | SNP | 40% |
| 1060 | s5 | SNP | 35% |
| 1061 | s69 | SNP | 40% |
| 1062 | s8 | REF | 60% |
| 1063 | s8 | SNP | 65% |
| 1064 | s8 | REF | 40% |
| 1065 | s8 | SNP | 45% |
| 1066 | s8 | SNP | 45% |
| 1067 | s8 | SNP | 45% |
| 1068 | s8 | REF | 40% |
| 1069 | s8 | SNP | 50% |
| 1070 | s8 | REF | 45% |
| 1071 | s8 | REF | 50% |
| 1072 | s8 | REF | 40% |
| 1073 | s8 | SNP | 45% |
| 1074 | s8 | REF | 55% |
| 1075 | s8 | SNP | 60% |
| 1076 | s8 | SNP | 55% |
| 1077 | s8 | REF | 50% |
| 1078 | s8 | SNP | 60% |
| 1079 | s8 | REF | 55% |
| 1080 | s8 | SNP | 65% |
| 1081 | s8 | REF | 60% |
| 1082 | s8 | SNP | 45% |
| 1083 | s8 | SNP | 45% |
| 1084 | s8 | SNP | 45% |
| 1085 | s8 | REF | 40% |
| 1086 | s8 | REF | 40% |
| 1087 | s8 | SNP | 45% |
| 1088 | s8 | REF | 40% |
| 1089 | s8 | REF | 40% |
| 1090 | s8 | SNP | 60% |
| 1091 | s8 | SNP | 65% |
| 1092 | s8 | REF | 40% |
| 1093 | s8 | SNP | 45% |
| 1094 | s8 | SNP | 50% |
| 1095 | s8 | REF | 45% |
| 1096 | s8 | REF | 40% |
| 1097 | s8 | SNP | 45% |
| 1098 | s8 | REF | 40% |
| 1099 | s8 | SNP | 45% |
| 1100 | s8 | SNP | 65% |
| 1101 | s8 | SNP | 65% |
| 1102 | s8 | SNP | 55% |
| 1103 | s8 | SNP | 65% |
| 1104 | s8 | SNP | 65% |
| 1105 | s8 | REF | 60% |
| 1106 | s8 | SNP | 55% |
| 1107 | s8 | SNP | 60% |
| 1108 | s8 | REF | 55% |
| 1109 | s8 | REF | 40% |
| 1110 | s8 | SNP | 65% |
| 1111 | s8 | REF | 60% |
| 1112 | s8 | SNP | 55% |
| 1113 | s8 | SNP | 65% |
| 1114 | s8 | REF | 60% |
| 1115 | s9 | REF | 60% |
| 1116 | s9 | SNP | 55% |
| 1117 | s9 | REF | 60% |
| 1118 | s9 | SNP | 55% |
| 1119 | s9 | SNP | 60% |
| 1120 | s9 | SNP | 60% |
| 1121 | s9 | REF | 65% |
| 1122 | s9 | REF | 60% |
| 1123 | s9 | SNP | 55% |
| 1124 | s9 | REF | 55% |
| 1125 | s9 | REF | 65% |
| 1126 | s9 | SNP | 60% |
| 1127 | s9 | REF | 65% |
| 1128 | s9 | SNP | 60% |
| 1129 | s9 | REF | 65% |
| 1130 | s9 | SNP | 60% |
| 1131 | s9 | REF | 65% |
| 1132 | s9 | REF | 65% |
| 1133 | s9 | SNP | 60% |
| 1134 | s9 | SNP | 60% |
| 1135 | s9 | REF | 70% |
| 1136 | s9 | SNP | 65% |
| 1137 | s9 | SNP | 65% |
| 1138 | s9 | REF | 70% |
| 1139 | s9 | REF | 65% |
| 1140 | s9 | SNP | 60% |
| 1141 | s9 | SNP | 60% |
| 1142 | s9 | REF | 65% |
| 1143 | s9 | SNP | 60% |
| 1144 | s9 | REF | 65% |
| 1145 | s9 | REF | 65% |
| 1146 | s9 | SNP | 60% |
| 1147 | s9 | SNP | 65% |
| 1148 | s9 | REF | 70% |
| 1149 | s9 | REF | 65% |
| 1150 | s9 | SNP | 60% |
| 1151 | s9 | REF | 65% |
| 1152 | s9 | SNP | 60% |
| 1153 | s9 | REF | 65% |
| 1154 | s9 | SNP | 60% |
| 1155 | s9 | SNP | 60% |
| 1156 | s9 | REF | 65% |
| 1157 | s9 | REF | 65% |
| 1158 | s9 | SNP | 50% |
| 1159 | s9 | SNP | 60% |
| 1160 | s9 | REF | 65% |
| 1161 | s9 | SNP | 60% |
| 1162 | s9 | REF | 65% |
| 1163 | s9 | REF | 65% |
| 1164 | s9 | SNP | 60% |
| 1165 | s9 | SNP | 55% |
| 1166 | s9 | REF | 60% |
| 1167 | s70 | SNP | 65% |
| 1168 | s70 | SNP | 75% |
| 1169 | s70 | SNP | 80% |
| 1170 | s70 | SNP | 55% |
| 1171 | s70 | REF | 60% |
| 1172 | s70 | REF | 75% |
| 1173 | s70 | SNP | 70% |
| 1174 | s70 | REF | 75% |
| 1175 | s70 | REF | 70% |
| 1176 | s70 | SNP | 70% |
| 1177 | s70 | SNP | 75% |
| 1178 | s70 | REF | 65% |
| 1179 | s71 | SNP | 45% |
| 1180 | s71 | SNP | 65% |
| 1181 | s71 | SNP | 65% |
| 1182 | s71 | SNP | 55% |
| 1183 | s71 | SNP | 65% |
| 1184 | s71 | SNP | 45% |
| 1185 | s71 | SNP | 45% |
| 1186 | s71 | SNP | 50% |
| 1187 | s10 | REF | 65% |
| 1188 | s10 | SNP | 70% |
| 1189 | s10 | SNP | 75% |
| 1190 | s10 | REF | 70% |
| 1191 | s10 | SNP | 70% |
| 1192 | s10 | REF | 65% |
| 1193 | s10 | REF | 55% |
| 1194 | s10 | REF | 65% |
| 1195 | s10 | SNP | 70% |
| 1196 | s10 | SNP | 75% |
| 1197 | s10 | REF | 70% |
| 1198 | s10 | SNP | 75% |
| 1199 | s10 | REF | 70% |
| 1200 | s10 | REF | 55% |
| 1201 | s10 | SNP | 80% |
| 1202 | s10 | REF | 75% |
| 1203 | s10 | SNP | 70% |
| 1204 | s10 | SNP | 70% |
| 1205 | s10 | REF | 55% |
| 1206 | s10 | SNP | 60% |
| 1207 | s10 | REF | 65% |
| 1208 | s10 | SNP | 70% |
| 1209 | s10 | SNP | 80% |
| 1210 | s10 | SNP | 60% |
| 1211 | s10 | REF | 55% |
| 1212 | s10 | REF | 70% |
| 1213 | s10 | SNP | 75% |
| 1214 | s10 | SNP | 60% |
| 1215 | s10 | REF | 55% |
| 1216 | s10 | SNP | 60% |
| 1217 | s10 | REF | 65% |
| 1218 | s10 | REF | 65% |
| 1219 | s10 | SNP | 70% |
| 1220 | s10 | SNP | 75% |
| 1221 | s10 | REF | 70% |
| 1222 | s10 | SNP | 70% |
| 1223 | s10 | REF | 60% |
| 1224 | s10 | SNP | 65% |
| 1225 | s10 | REF | 65% |
| 1226 | s10 | REF | 65% |
| 1227 | s10 | SNP | 70% |
| 1228 | s10 | REF | 65% |
| 1229 | s10 | SNP | 70% |
| 1230 | s10 | REF | 65% |
| 1231 | s10 | SNP | 70% |
| 1232 | s10 | SNP | 75% |
| 1233 | s10 | SNP | 60% |
| 1234 | s10 | REF | 70% |
| 1235 | s10 | SNP | 75% |
| 1236 | s10 | REF | 55% |
| 1237 | s10 | SNP | 75% |
| 1238 | s10 | REF | 70% |
| 1239 | s10 | REF | 70% |
| 1240 | s10 | SNP | 75% |
| 1241 | s10 | SNP | 60% |
| 1242 | s10 | REF | 50% |
| 1243 | s10 | REF | 70% |
| 1244 | s10 | SNP | 75% |
| 1245 | s10 | SNP | 55% |
| 1246 | s10 | REF | 65% |
| 1247 | s10 | SNP | 70% |
| 1248 | s10 | REF | 65% |
| 1249 | s10 | SNP | 65% |
| 1250 | s10 | REF | 60% |
| 1251 | s11 | SNP | 45% |
| 1252 | s11 | SNP | 55% |
| 1253 | s11 | REF | 50% |
| 1254 | s11 | SNP | 35% |
| 1255 | s11 | REF | 55% |
| 1256 | s11 | SNP | 60% |
| 1257 | s11 | SNP | 35% |
| 1258 | s11 | SNP | 55% |
| 1259 | s11 | REF | 50% |
| 1260 | s11 | SNP | 35% |
| 1261 | s11 | SNP | 35% |
| 1262 | s11 | SNP | 40% |
| 1263 | s11 | SNP | 60% |
| 1264 | s11 | SNP | 35% |
| 1265 | s11 | SNP | 55% |
| 1266 | s11 | REF | 45% |
| 1267 | s11 | SNP | 50% |
| 1268 | s11 | REF | 60% |
| 1269 | s11 | SNP | 65% |
| 1270 | s11 | REF | 50% |
| 1271 | s11 | SNP | 55% |
| 1272 | s11 | REF | 55% |
| 1273 | s11 | SNP | 40% |
| 1274 | s11 | REF | 35% |
| 1275 | s11 | SNP | 35% |
| 1276 | s11 | SNP | 40% |
| 1277 | s11 | SNP | 65% |
| 1278 | s11 | REF | 60% |
| 1279 | s11 | REF | 55% |
| 1280 | s11 | SNP | 60% |
| 1281 | s11 | SNP | 35% |
| 1282 | s11 | SNP | 50% |
| 1283 | s11 | REF | 45% |
| 1284 | s11 | REF | 50% |
| 1285 | s11 | SNP | 55% |
| 1286 | s11 | SNP | 35% |
| 1287 | s11 | REF | 45% |
| 1288 | s11 | SNP | 50% |
| 1289 | s11 | SNP | 55% |
| 1290 | s11 | SNP | 35% |
| 1291 | s11 | SNP | 60% |
| 1292 | s11 | REF | 55% |
| 1293 | s11 | REF | 50% |
| 1294 | s11 | SNP | 35% |
| 1295 | s11 | SNP | 35% |
| 1296 | s11 | SNP | 35% |
| 1297 | s12 | SNP | 50% |
| 1298 | s12 | SNP | 55% |
| 1299 | s12 | SNP | 45% |
| 1300 | s12 | REF | 45% |
| 1301 | s12 | SNP | 50% |
| 1302 | s12 | REF | 50% |
| 1303 | s12 | SNP | 50% |
| 1304 | s12 | REF | 50% |
| 1305 | s12 | REF | 45% |
| 1306 | s12 | SNP | 45% |
| 1307 | s12 | REF | 50% |
| 1308 | s12 | REF | 35% |
| 1309 | s12 | REF | 35% |
| 1310 | s12 | REF | 50% |
| 1311 | s12 | SNP | 50% |
| 1312 | s12 | REF | 40% |
| 1313 | s12 | REF | 55% |
| 1314 | s12 | SNP | 55% |
| 1315 | s12 | SNP | 50% |
| 1316 | s12 | REF | 50% |
| 1317 | s12 | SNP | 50% |
| 1318 | s12 | SNP | 55% |
| 1319 | s12 | REF | 55% |
| 1320 | s12 | REF | 50% |
| 1321 | s12 | SNP | 50% |
| 1322 | s12 | REF | 50% |
| 1323 | s12 | REF | 50% |
| 1324 | s12 | REF | 55% |
| 1325 | s12 | SNP | 55% |
| 1326 | s12 | SNP | 40% |
| 1327 | s12 | REF | 40% |
| 1328 | s12 | REF | 45% |
| 1329 | s12 | REF | 50% |
| 1330 | s12 | SNP | 50% |
| 1331 | s12 | REF | 35% |
| 1332 | s12 | SNP | 40% |
| 1333 | s12 | REF | 40% |
| 1334 | s12 | SNP | 45% |
| 1335 | s12 | REF | 45% |
| 1336 | s12 | REF | 55% |
| 1337 | s12 | REF | 50% |
| 1338 | s12 | SNP | 50% |
| 1339 | s12 | SNP | 50% |
| 1340 | s12 | REF | 50% |
| 1341 | s12 | REF | 35% |
| 1342 | s12 | SNP | 40% |
| 1343 | s12 | REF | 40% |
| 1344 | s12 | REF | 50% |
| 1345 | s12 | REF | 35% |
| 1346 | s12 | SNP | 35% |
| 1347 | s13 | REF | 40% |
| 1348 | s13 | REF | 40% |
| 1349 | s13 | SNP | 45% |
| 1350 | s13 | SNP | 35% |
| 1351 | s13 | REF | 40% |
| 1352 | s13 | SNP | 45% |
| 1353 | s13 | SNP | 45% |
| 1354 | s13 | SNP | 35% |
| 1355 | s13 | SNP | 35% |
| 1356 | s13 | REF | 35% |
| 1357 | s13 | SNP | 40% |
| 1358 | s13 | SNP | 35% |
| 1359 | s14 | SNP | 65% |
| 1360 | s14 | SNP | 60% |
| 1361 | s14 | REF | 70% |
| 1362 | s14 | REF | 55% |
| 1363 | s14 | SNP | 60% |
| 1364 | s14 | SNP | 70% |
| 1365 | s14 | REF | 65% |
| 1366 | s14 | REF | 60% |
| 1367 | s14 | SNP | 65% |
| 1368 | s14 | SNP | 65% |
| 1369 | s14 | SNP | 55% |
| 1370 | s14 | REF | 50% |
| 1371 | s14 | REF | 70% |
| 1372 | s14 | SNP | 75% |
| 1373 | s14 | REF | 50% |
| 1374 | s14 | REF | 60% |
| 1375 | s14 | SNP | 65% |
| 1376 | s14 | SNP | 75% |
| 1377 | s14 | SNP | 60% |
| 1378 | s14 | SNP | 65% |
| 1379 | s14 | SNP | 55% |
| 1380 | s14 | SNP | 75% |
| 1381 | s14 | REF | 60% |
| 1382 | s14 | SNP | 65% |
| 1383 | s14 | REF | 60% |
| 1384 | s14 | SNP | 65% |
| 1385 | s14 | SNP | 75% |
| 1386 | s14 | SNP | 65% |
| 1387 | s14 | SNP | 65% |
| 1388 | s14 | SNP | 75% |
| 1389 | s14 | REF | 70% |
| 1390 | s14 | SNP | 70% |
| 1391 | s14 | REF | 65% |
| 1392 | s14 | REF | 70% |
| 1393 | s14 | SNP | 75% |
| 1394 | s14 | SNP | 70% |
| 1395 | s14 | SNP | 70% |
| 1396 | s14 | REF | 65% |
| 1397 | s14 | REF | 70% |
| 1398 | s14 | REF | 65% |
| 1399 | s14 | SNP | 70% |
| 1400 | s14 | SNP | 65% |
| 1401 | s14 | REF | 60% |
| 1402 | s14 | SNP | 55% |
| 1403 | s14 | SNP | 60% |
| 1404 | s14 | REF | 55% |
| 1405 | s14 | SNP | 65% |
| 1406 | s14 | REF | 60% |
| 1407 | s14 | REF | 70% |
| 1408 | s14 | SNP | 75% |
| 1409 | s14 | REF | 60% |
| 1410 | s14 | SNP | 65% |
| 1411 | s14 | REF | 70% |
| 1412 | s14 | SNP | 65% |
| 1413 | s14 | REF | 60% |
| 1414 | s14 | SNP | 70% |
| 1415 | s72 | SNP | 35% |
| 1416 | s15 | REF | 50% |
| 1417 | s15 | SNP | 55% |
| 1418 | s15 | REF | 55% |
| 1419 | s15 | SNP | 60% |
| 1420 | s15 | SNP | 50% |
| 1421 | s15 | REF | 45% |
| 1422 | s15 | REF | 45% |
| 1423 | s15 | SNP | 50% |
| 1424 | s15 | REF | 40% |
| 1425 | s15 | SNP | 45% |
| 1426 | s15 | REF | 35% |
| 1427 | s15 | REF | 50% |
| 1428 | s15 | SNP | 55% |
| 1429 | s15 | REF | 45% |
| 1430 | s15 | SNP | 50% |
| 1431 | s15 | SNP | 40% |
| 1432 | s15 | SNP | 40% |
| 1433 | s15 | REF | 40% |
| 1434 | s15 | SNP | 45% |
| 1435 | s15 | SNP | 45% |
| 1436 | s15 | REF | 60% |
| 1437 | s15 | SNP | 65% |
| 1438 | s15 | SNP | 50% |
| 1439 | s15 | REF | 45% |
| 1440 | s15 | SNP | 65% |
| 1441 | s15 | REF | 60% |
| 1442 | s15 | REF | 40% |
| 1443 | s15 | SNP | 60% |
| 1444 | s15 | SNP | 55% |
| 1445 | s15 | REF | 50% |
| 1446 | s15 | SNP | 35% |
| 1447 | s15 | SNP | 45% |
| 1448 | s15 | REF | 40% |
| 1449 | s15 | SNP | 60% |
| 1450 | s15 | REF | 55% |
| 1451 | s15 | REF | 40% |
| 1452 | s15 | SNP | 45% |
| 1453 | s15 | REF | 50% |
| 1454 | s15 | SNP | 55% |
| 1455 | s15 | REF | 45% |
| 1456 | s15 | SNP | 50% |
| 1457 | s15 | REF | 40% |
| 1458 | s15 | SNP | 45% |
| 1459 | s15 | REF | 35% |
| 1460 | s15 | SNP | 40% |
| 1461 | s15 | SNP | 60% |
| 1462 | s15 | REF | 55% |
| 1463 | s15 | REF | 35% |
| 1464 | s15 | SNP | 45% |
| 1465 | s15 | REF | 40% |
| 1466 | s15 | SNP | 60% |
| 1467 | s15 | REF | 55% |
| 1468 | s15 | REF | 35% |
| 1469 | s15 | SNP | 40% |
| 1470 | s15 | SNP | 60% |
| 1471 | s15 | REF | 55% |
| 1472 | s15 | SNP | 55% |
| 1473 | s15 | REF | 50% |
| 1474 | s16 | SNP | 75% |
| 1475 | s16 | REF | 80% |
| 1476 | s16 | REF | 85% |
| 1477 | s16 | SNP | 80% |
| 1478 | s16 | SNP | 80% |
| 1479 | s16 | SNP | 80% |
| 1480 | s16 | REF | 85% |
| 1481 | s16 | SNP | 65% |
| 1482 | s16 | REF | 70% |
| 1483 | s16 | SNP | 70% |
| 1484 | s16 | REF | 75% |
| 1485 | s16 | REF | 85% |
| 1486 | s16 | SNP | 80% |
| 1487 | s16 | REF | 85% |
| 1488 | s16 | SNP | 80% |
| 1489 | s16 | REF | 80% |
| 1490 | s16 | SNP | 75% |
| 1491 | s16 | REF | 75% |
| 1492 | s16 | SNP | 70% |
| 1493 | s16 | REF | 70% |
| 1494 | s16 | SNP | 65% |
| 1495 | s16 | REF | 75% |
| 1496 | s16 | SNP | 70% |
| 1497 | s16 | REF | 75% |
| 1498 | s16 | SNP | 65% |
| 1499 | s16 | REF | 70% |
| 1500 | s16 | SNP | 70% |
| 1501 | s16 | REF | 75% |
| 1502 | s16 | REF | 85% |
| 1503 | s16 | SNP | 70% |
| 1504 | s16 | SNP | 80% |
| 1505 | s16 | REF | 90% |
| 1506 | s16 | SNP | 85% |
| 1507 | s16 | REF | 70% |
| 1508 | s16 | REF | 85% |
| 1509 | s16 | REF | 80% |
| 1510 | s16 | SNP | 80% |
| 1511 | s16 | REF | 70% |
| 1512 | s16 | SNP | 65% |
| 1513 | s16 | SNP | 65% |
| 1514 | s17 | REF | 45% |
| 1515 | s17 | SNP | 45% |
| 1516 | s17 | SNP | 45% |
| 1517 | s17 | REF | 45% |
| 1518 | s17 | SNP | 40% |
| 1519 | s17 | SNP | 50% |
| 1520 | s17 | SNP | 50% |
| 1521 | s17 | REF | 45% |
| 1522 | s17 | REF | 45% |
| 1523 | s17 | SNP | 45% |
| 1524 | s17 | SNP | 45% |
| 1525 | s17 | SNP | 55% |
| 1526 | s17 | REF | 50% |
| 1527 | s17 | SNP | 70% |
| 1528 | s17 | SNP | 45% |
| 1529 | s17 | SNP | 45% |
| 1530 | s17 | SNP | 45% |
| 1531 | s17 | REF | 55% |
| 1532 | s17 | SNP | 45% |
| 1533 | s17 | SNP | 45% |
| 1534 | s17 | REF | 60% |
| 1535 | s17 | SNP | 65% |
| 1536 | s17 | REF | 60% |
| 1537 | s17 | SNP | 65% |
| 1538 | s17 | REF | 65% |
| 1539 | s17 | SNP | 70% |
| 1540 | s17 | REF | 70% |
| 1541 | s17 | REF | 60% |
| 1542 | s17 | REF | 45% |
| 1543 | s17 | SNP | 45% |
| 1544 | s17 | SNP | 65% |
| 1545 | s17 | REF | 65% |
| 1546 | s17 | SNP | 45% |
| 1547 | s17 | REF | 55% |
| 1548 | s17 | SNP | 45% |
| 1549 | s17 | REF | 40% |
| 1550 | s17 | REF | 60% |
| 1551 | s17 | SNP | 40% |
| 1552 | s17 | SNP | 55% |
| 1553 | s17 | REF | 50% |
| 1554 | s17 | SNP | 45% |
| 1555 | s18 | REF | 60% |
| 1556 | s18 | SNP | 65% |
| 1557 | s18 | REF | 55% |
| 1558 | s18 | SNP | 60% |
| 1559 | s18 | REF | 65% |
| 1560 | s18 | SNP | 70% |
| 1561 | s18 | REF | 65% |
| 1562 | s18 | SNP | 70% |
| 1563 | s18 | REF | 55% |
| 1564 | s18 | REF | 65% |
| 1565 | s18 | SNP | 70% |
| 1566 | s18 | REF | 60% |
| 1567 | s18 | SNP | 65% |
| 1568 | s18 | REF | 60% |
| 1569 | s18 | SNP | 65% |
| 1570 | s18 | SNP | 70% |
| 1571 | s18 | SNP | 65% |
| 1572 | s18 | SNP | 65% |
| 1573 | s18 | SNP | 70% |
| 1574 | s18 | REF | 60% |
| 1575 | s18 | SNP | 75% |
| 1576 | s18 | REF | 70% |
| 1577 | s18 | REF | 70% |
| 1578 | s18 | SNP | 75% |
| 1579 | s18 | REF | 55% |
| 1580 | s18 | SNP | 60% |
| 1581 | s18 | SNP | 75% |
| 1582 | s18 | REF | 70% |
| 1583 | s18 | SNP | 70% |
| 1584 | s18 | REF | 65% |
| 1585 | s18 | SNP | 60% |
| 1586 | s18 | SNP | 75% |
| 1587 | s18 | REF | 70% |
| 1588 | s18 | SNP | 60% |
| 1589 | s18 | REF | 65% |
| 1590 | s18 | SNP | 70% |
| 1591 | s18 | SNP | 65% |
| 1592 | s18 | REF | 60% |
| 1593 | s18 | SNP | 65% |
| 1594 | s18 | REF | 60% |
| 1595 | s18 | REF | 60% |
| 1596 | s18 | SNP | 65% |
| 1597 | s18 | REF | 60% |
| 1598 | s18 | SNP | 70% |
| 1599 | s18 | REF | 65% |
| 1600 | s18 | SNP | 70% |
| 1601 | s18 | REF | 65% |
| 1602 | s18 | SNP | 65% |
| 1603 | s18 | REF | 60% |
| 1604 | s18 | SNP | 65% |
| 1605 | s18 | REF | 60% |
| 1606 | s18 | SNP | 65% |
| 1607 | s18 | REF | 60% |
| 1608 | s37 | SNP | 40% |
| 1609 | s37 | SNP | 35% |
| 1610 | s37 | SNP | 45% |
| 1611 | s19 | REF | 45% |
| 1612 | s19 | SNP | 45% |
| 1613 | s19 | SNP | 55% |
| 1614 | s19 | REF | 55% |
| 1615 | s19 | REF | 55% |
| 1616 | s19 | SNP | 55% |
| 1617 | s19 | SNP | 45% |
| 1618 | s19 | REF | 45% |
| 1619 | s19 | SNP | 55% |
| 1620 | s19 | REF | 55% |
| 1621 | s19 | SNP | 50% |
| 1622 | s19 | REF | 55% |
| 1623 | s19 | SNP | 55% |
| 1624 | s19 | REF | 55% |
| 1625 | s19 | SNP | 55% |
| 1626 | s19 | REF | 50% |
| 1627 | s19 | SNP | 50% |
| 1628 | s19 | SNP | 55% |
| 1629 | s19 | REF | 55% |
| 1630 | s19 | SNP | 50% |
| 1631 | s19 | REF | 50% |
| 1632 | s19 | REF | 55% |
| 1633 | s19 | REF | 60% |
| 1634 | s19 | REF | 50% |
| 1635 | s19 | SNP | 50% |
| 1636 | s19 | SNP | 55% |
| 1637 | s19 | REF | 55% |
| 1638 | s19 | SNP | 45% |
| 1639 | s19 | REF | 45% |
| 1640 | s19 | SNP | 55% |
| 1641 | s19 | REF | 55% |
| 1642 | s19 | SNP | 55% |
| 1643 | s19 | REF | 50% |
| 1644 | s19 | SNP | 50% |
| 1645 | s19 | REF | 55% |
| 1646 | s19 | SNP | 55% |
| 1647 | s19 | SNP | 50% |
| 1648 | s19 | SNP | 50% |
| 1649 | s19 | REF | 50% |
| 1650 | s19 | SNP | 45% |
| 1651 | s19 | REF | 45% |
| 1652 | s19 | REF | 50% |
| 1653 | s19 | SNP | 50% |
| 1654 | s19 | REF | 55% |
| 1655 | s19 | SNP | 50% |
| 1656 | s19 | REF | 50% |
| 1657 | s19 | SNP | 55% |
| 1658 | s19 | SNP | 45% |
| 1659 | s19 | REF | 45% |
| 1660 | s19 | SNP | 45% |
| 1661 | s20 | SNP | 70% |
| 1662 | s20 | REF | 65% |
| 1663 | s20 | REF | 65% |
| 1664 | s20 | SNP | 70% |
| 1665 | s20 | REF | 65% |
| 1666 | s20 | SNP | 70% |
| 1667 | s20 | SNP | 70% |
| 1668 | s20 | REF | 65% |
| 1669 | s20 | REF | 70% |
| 1670 | s20 | SNP | 75% |
| 1671 | s20 | REF | 65% |
| 1672 | s20 | SNP | 65% |
| 1673 | s20 | SNP | 70% |
| 1674 | s20 | REF | 65% |
| 1675 | s20 | REF | 65% |
| 1676 | s20 | SNP | 70% |
| 1677 | s20 | SNP | 75% |
| 1678 | s20 | REF | 70% |
| 1679 | s20 | SNP | 65% |
| 1680 | s20 | REF | 60% |
| 1681 | s20 | SNP | 65% |
| 1682 | s20 | REF | 60% |
| 1683 | s20 | SNP | 70% |
| 1684 | s20 | REF | 65% |
| 1685 | s20 | REF | 65% |
| 1686 | s20 | SNP | 70% |
| 1687 | s20 | SNP | 70% |
| 1688 | s20 | REF | 65% |
| 1689 | s20 | REF | 65% |
| 1690 | s20 | SNP | 70% |
| 1691 | s20 | SNP | 70% |
| 1692 | s20 | REF | 65% |
| 1693 | s20 | SNP | 75% |
| 1694 | s20 | REF | 70% |
| 1695 | s20 | SNP | 70% |
| 1696 | s20 | REF | 65% |
| 1697 | s20 | REF | 65% |
| 1698 | s20 | SNP | 70% |
| 1699 | s20 | REF | 70% |
| 1700 | s20 | SNP | 75% |
| 1701 | s20 | REF | 65% |
| 1702 | s20 | SNP | 70% |
| 1703 | s20 | REF | 65% |
| 1704 | s20 | SNP | 70% |
| 1705 | s20 | REF | 65% |
| 1706 | s20 | SNP | 65% |
| 1707 | s20 | REF | 60% |
| 1708 | s20 | SNP | 65% |
| 1709 | s20 | REF | 60% |
| 1710 | s20 | REF | 65% |
| 1711 | s20 | SNP | 70% |
| 1712 | s20 | REF | 65% |
| 1713 | s20 | REF | 65% |
| 1714 | s20 | SNP | 70% |
| 1715 | s20 | REF | 60% |
| 1716 | s20 | SNP | 65% |
| 1717 | s21 | REF | 40% |
| 1718 | s21 | SNP | 45% |
| 1719 | s21 | REF | 60% |
| 1720 | s21 | SNP | 50% |
| 1721 | s21 | REF | 55% |
| 1722 | s21 | SNP | 60% |
| 1723 | s21 | REF | 45% |
| 1724 | s21 | SNP | 50% |
| 1725 | s21 | REF | 45% |
| 1726 | s21 | SNP | 50% |
| 1727 | s21 | SNP | 50% |
| 1728 | s21 | REF | 50% |
| 1729 | s21 | SNP | 55% |
| 1730 | s21 | REF | 50% |
| 1731 | s21 | SNP | 55% |
| 1732 | s21 | SNP | 55% |
| 1733 | s21 | REF | 50% |
| 1734 | s21 | SNP | 55% |
| 1735 | s21 | REF | 50% |
| 1736 | s21 | SNP | 55% |
| 1737 | s21 | REF | 50% |
| 1738 | s21 | SNP | 50% |
| 1739 | s21 | REF | 45% |
| 1740 | s21 | REF | 45% |
| 1741 | s21 | SNP | 50% |
| 1742 | s21 | REF | 45% |
| 1743 | s21 | SNP | 50% |
| 1744 | s21 | SNP | 50% |
| 1745 | s21 | SNP | 65% |
| 1746 | s21 | SNP | 60% |
| 1747 | s21 | REF | 55% |
| 1748 | s21 | SNP | 50% |
| 1749 | s21 | REF | 45% |
| 1750 | s21 | REF | 45% |
| 1751 | s21 | SNP | 50% |
| 1752 | s21 | SNP | 50% |
| 1753 | s21 | SNP | 65% |
| 1754 | s21 | REF | 60% |
| 1755 | s21 | REF | 45% |
| 1756 | s21 | SNP | 50% |
| 1757 | s21 | SNP | 50% |
| 1758 | s21 | REF | 45% |
| 1759 | s21 | REF | 45% |
| 1760 | s21 | REF | 45% |
| 1761 | s21 | SNP | 50% |
| 1762 | s21 | REF | 45% |
| 1763 | s21 | REF | 60% |
| 1764 | s21 | REF | 50% |
| 1765 | s21 | SNP | 55% |
| 1766 | s21 | SNP | 55% |
| 1767 | s21 | REF | 50% |
| 1768 | s21 | REF | 40% |
| 1769 | s21 | SNP | 45% |
| 1770 | s21 | SNP | 65% |
| 1771 | s21 | SNP | 50% |
| 1772 | s21 | REF | 45% |
| 1773 | s21 | SNP | 65% |
| 1774 | s21 | REF | 60% |
| 1775 | s21 | SNP | 45% |
| 1776 | s21 | REF | 40% |
| 1777 | s21 | SNP | 50% |
| 1778 | s21 | REF | 45% |
| 1779 | s21 | REF | 45% |
| 1780 | s21 | SNP | 50% |
| 1781 | s21 | REF | 45% |
| 1782 | s21 | SNP | 50% |
| 1783 | s22 | REF | 55% |
| 1784 | s22 | REF | 50% |
| 1785 | s22 | SNP | 45% |
| 1786 | s22 | SNP | 40% |
| 1787 | s22 | REF | 45% |
| 1788 | s22 | REF | 45% |
| 1789 | s22 | REF | 55% |
| 1790 | s22 | SNP | 50% |
| 1791 | s22 | SNP | 40% |
| 1792 | s22 | REF | 50% |
| 1793 | s22 | SNP | 50% |
| 1794 | s22 | SNP | 50% |
| 1795 | s22 | REF | 55% |
| 1796 | s22 | SNP | 45% |
| 1797 | s22 | REF | 50% |
| 1798 | s22 | REF | 45% |
| 1799 | s22 | SNP | 40% |
| 1800 | s22 | SNP | 50% |
| 1801 | s22 | REF | 55% |
| 1802 | s22 | SNP | 50% |
| 1803 | s22 | REF | 55% |
| 1804 | s22 | REF | 55% |
| 1805 | s22 | REF | 55% |
| 1806 | s22 | SNP | 50% |
| 1807 | s22 | REF | 55% |
| 1808 | s22 | SNP | 50% |
| 1809 | s22 | SNP | 50% |
| 1810 | s22 | REF | 55% |
| 1811 | s22 | REF | 45% |
| 1812 | s22 | SNP | 40% |
| 1813 | s22 | REF | 55% |
| 1814 | s22 | SNP | 50% |
| 1815 | s22 | REF | 50% |
| 1816 | s22 | SNP | 45% |
| 1817 | s22 | REF | 55% |
| 1818 | s22 | SNP | 50% |
| 1819 | s22 | REF | 55% |
| 1820 | s22 | SNP | 50% |
| 1821 | s22 | SNP | 50% |
| 1822 | s22 | REF | 55% |
| 1823 | s22 | SNP | 45% |
| 1824 | s22 | REF | 50% |
| 1825 | s22 | SNP | 40% |
| 1826 | s22 | REF | 45% |
| 1827 | s22 | SNP | 40% |
| 1828 | s22 | REF | 45% |
| 1829 | s22 | SNP | 45% |
| 1830 | s22 | SNP | 50% |
| 1831 | s22 | REF | 55% |
| 1832 | s22 | REF | 50% |
| 1833 | s22 | REF | 50% |
| 1834 | s22 | REF | 55% |
| 1835 | s22 | SNP | 50% |
| 1836 | s22 | REF | 50% |
| 1837 | s22 | SNP | 45% |
| 1838 | s22 | SNP | 50% |
| 1839 | s22 | REF | 55% |
| 1840 | s22 | SNP | 45% |
| 1841 | s22 | SNP | 40% |
| 1842 | s22 | REF | 45% |
| 1843 | s22 | SNP | 50% |
| 1844 | s22 | REF | 55% |
| 1845 | s23 | SNP | 55% |
| 1846 | s23 | SNP | 60% |
| 1847 | s23 | SNP | 50% |
| 1848 | s23 | REF | 55% |
| 1849 | s23 | SNP | 60% |
| 1850 | s23 | REF | 65% |
| 1851 | s23 | SNP | 45% |
| 1852 | s23 | REF | 50% |
| 1853 | s23 | SNP | 70% |
| 1854 | s23 | REF | 65% |
| 1855 | s23 | SNP | 60% |
| 1856 | s23 | REF | 60% |
| 1857 | s23 | SNP | 55% |
| 1858 | s23 | SNP | 55% |
| 1859 | s23 | REF | 50% |
| 1860 | s23 | SNP | 45% |
| 1861 | s23 | REF | 65% |
| 1862 | s23 | SNP | 60% |
| 1863 | s23 | REF | 65% |
| 1864 | s23 | SNP | 60% |
| 1865 | s23 | REF | 65% |
| 1866 | s23 | SNP | 60% |
| 1867 | s23 | SNP | 65% |
| 1868 | s23 | SNP | 60% |
| 1869 | s23 | REF | 65% |
| 1870 | s23 | SNP | 60% |
| 1871 | s23 | REF | 65% |
| 1872 | s23 | SNP | 55% |
| 1873 | s23 | SNP | 50% |
| 1874 | s23 | REF | 55% |
| 1875 | s23 | SNP | 60% |
| 1876 | s23 | REF | 65% |
| 1877 | s23 | SNP | 50% |
| 1878 | s23 | REF | 55% |
| 1879 | s23 | REF | 55% |
| 1880 | s23 | SNP | 50% |
| 1881 | s23 | SNP | 55% |
| 1882 | s23 | REF | 60% |
| 1883 | s23 | REF | 55% |
| 1884 | s23 | SNP | 50% |
| 1885 | s23 | REF | 60% |
| 1886 | s23 | SNP | 55% |
| 1887 | s23 | REF | 65% |
| 1888 | s23 | SNP | 60% |
| 1889 | s23 | REF | 65% |
| 1890 | s23 | SNP | 60% |
| 1891 | s23 | REF | 60% |
| 1892 | s23 | REF | 65% |
| 1893 | s23 | SNP | 60% |
| 1894 | s23 | SNP | 60% |
| 1895 | s23 | REF | 55% |
| 1896 | s23 | SNP | 55% |
| 1897 | s23 | SNP | 50% |
| 1898 | s39 | SNP | 75% |
| 1899 | s39 | SNP | 60% |
| 1900 | s39 | SNP | 70% |
| 1901 | s39 | SNP | 70% |
| 1902 | s39 | SNP | 70% |
| 1903 | s39 | SNP | 65% |
| 1904 | s39 | SNP | 70% |
| 1905 | s39 | SNP | 70% |
| 1906 | s39 | SNP | 70% |
| 1907 | s39 | SNP | 70% |
| 1908 | s39 | SNP | 75% |
| 1909 | s39 | SNP | 70% |
| 1910 | s39 | SNP | 75% |
| 1911 | s39 | SNP | 70% |
| 1912 | s39 | SNP | 70% |
| 1913 | s39 | SNP | 70% |
| 1914 | s39 | SNP | 70% |
| 1915 | s39 | SNP | 70% |
| 1916 | s39 | SNP | 70% |
| 1917 | s39 | SNP | 70% |
| 1918 | s39 | SNP | 70% |
| 1919 | s39 | SNP | 75% |
| 1920 | s39 | SNP | 70% |
| 1921 | s39 | SNP | 60% |
| 1922 | s39 | SNP | 70% |
| 1923 | s39 | SNP | 65% |
| 1924 | s39 | SNP | 70% |
| 1925 | s39 | SNP | 70% |
| 1926 | s39 | SNP | 70% |
| 1927 | s39 | SNP | 70% |
| 1928 | s38 | SNP | 35% |
| 1929 | s38 | SNP | 45% |
| 1930 | s38 | SNP | 45% |
| 1931 | s24 | REF | 60% |
| 1932 | s24 | SNP | 55% |
| 1933 | s24 | SNP | 55% |
| 1934 | s24 | SNP | 55% |
| 1935 | s24 | REF | 60% |
| 1936 | s24 | SNP | 55% |
| 1937 | s24 | REF | 65% |
| 1938 | s24 | SNP | 60% |
| 1939 | s24 | SNP | 55% |
| 1940 | s24 | REF | 60% |
| 1941 | s24 | SNP | 60% |
| 1942 | s24 | REF | 65% |
| 1943 | s24 | SNP | 60% |
| 1944 | s24 | SNP | 55% |
| 1945 | s24 | REF | 60% |
| 1946 | s24 | SNP | 60% |
| 1947 | s24 | SNP | 60% |
| 1948 | s24 | REF | 65% |
| 1949 | s24 | SNP | 60% |
| 1950 | s24 | SNP | 70% |
| 1951 | s24 | SNP | 70% |
| 1952 | s24 | SNP | 60% |
| 1953 | s24 | SNP | 60% |
| 1954 | s24 | SNP | 70% |
| 1955 | s24 | REF | 65% |
| 1956 | s24 | SNP | 60% |
| 1957 | s24 | REF | 65% |
| 1958 | s24 | SNP | 70% |
| 1959 | s24 | REF | 60% |
| 1960 | s24 | REF | 65% |
| 1961 | s24 | SNP | 60% |
| 1962 | s24 | SNP | 55% |
| 1963 | s24 | SNP | 55% |
| 1964 | s24 | SNP | 65% |
| 1965 | s24 | SNP | 60% |
| 1966 | s25 | SNP | 40% |
| 1967 | s25 | SNP | 60% |
| 1968 | s25 | REF | 65% |
| 1969 | s25 | SNP | 45% |
| 1970 | s25 | REF | 50% |
| 1971 | s25 | REF | 70% |
| 1972 | s25 | SNP | 50% |
| 1973 | s25 | REF | 55% |
| 1974 | s25 | REF | 45% |
| 1975 | s25 | REF | 50% |
| 1976 | s25 | SNP | 45% |
| 1977 | s25 | SNP | 45% |
| 1978 | s25 | REF | 55% |
| 1979 | s25 | SNP | 50% |
| 1980 | s25 | SNP | 65% |
| 1981 | s25 | SNP | 65% |
| 1982 | s25 | REF | 70% |
| 1983 | s25 | SNP | 50% |
| 1984 | s25 | REF | 55% |
| 1985 | s25 | SNP | 55% |
| 1986 | s25 | REF | 60% |
| 1987 | s25 | REF | 50% |
| 1988 | s25 | SNP | 45% |
| 1989 | s25 | REF | 60% |
| 1990 | s25 | SNP | 55% |
| 1991 | s25 | SNP | 60% |
| 1992 | s25 | REF | 65% |
| 1993 | s25 | SNP | 60% |
| 1994 | s25 | REF | 65% |
| 1995 | s25 | SNP | 50% |
| 1996 | s25 | REF | 55% |
| 1997 | s25 | SNP | 45% |
| 1998 | s25 | REF | 50% |
| 1999 | s25 | SNP | 70% |
| 2000 | s25 | REF | 75% |
| 2001 | s25 | SNP | 45% |
| 2002 | s25 | REF | 50% |
| 2003 | s25 | REF | 55% |
| 2004 | s25 | SNP | 50% |
| 2005 | s25 | REF | 65% |
| 2006 | s25 | SNP | 60% |
| 2007 | s25 | SNP | 55% |
| 2008 | s25 | REF | 60% |
| 2009 | s25 | REF | 70% |
| 2010 | s25 | SNP | 60% |
| 2011 | s25 | REF | 65% |
| 2012 | s25 | SNP | 65% |
| 2013 | s25 | SNP | 65% |
| 2014 | s25 | REF | 70% |
| 2015 | s25 | REF | 50% |
| 2016 | s25 | REF | 55% |
| 2017 | s25 | SNP | 50% |
| 2018 | s25 | REF | 50% |
| 2019 | s25 | SNP | 45% |
| 2020 | s25 | REF | 60% |
| 2021 | s25 | SNP | 55% |
| 2022 | s26 | SNP | 35% |
| 2023 | s26 | SNP | 35% |
| 2024 | s26 | REF | 35% |
| 2025 | s26 | SNP | 35% |
| 2026 | s26 | REF | 35% |
| 2027 | s26 | SNP | 35% |
| 2028 | s26 | REF | 35% |
| 2029 | s26 | REF | 35% |
| 2030 | s26 | SNP | 40% |
| 2031 | s26 | REF | 40% |
| 2032 | s26 | REF | 35% |
| 2033 | s26 | REF | 35% |
| 2034 | s26 | REF | 35% |
| 2035 | s26 | REF | 35% |
| 2036 | s26 | REF | 35% |
| 2037 | s26 | REF | 40% |
| 2038 | s26 | SNP | 40% |
| 2039 | s26 | REF | 40% |
| 2040 | s26 | REF | 35% |
| 2041 | s26 | SNP | 40% |
| 2042 | s26 | REF | 40% |
| 2043 | s26 | REF | 40% |
| 2044 | s26 | SNP | 40% |
| 2045 | s26 | REF | 40% |
| 2046 | s26 | REF | 35% |
| 2047 | s26 | REF | 40% |
| 2048 | s26 | SNP | 40% |
| 2049 | s26 | REF | 40% |
| 2050 | s26 | SNP | 35% |
| 2051 | s26 | REF | 35% |
| 2052 | s26 | SNP | 35% |
| 2053 | s26 | REF | 35% |
| 2054 | s26 | REF | 35% |
| 2055 | s26 | SNP | 35% |
| 2056 | s26 | REF | 35% |
| 2057 | s26 | SNP | 35% |
| 2058 | s26 | REF | 35% |
| 2059 | s73 | SNP | 35% |
| 2060 | s73 | SNP | 40% |
| 2061 | s73 | SNP | 40% |
| 2062 | s6 | SNP | 35% |
| 2063 | s27 | REF | 75% |
| 2064 | s27 | SNP | 80% |
| 2065 | s27 | REF | 75% |
| 2066 | s27 | SNP | 80% |
| 2067 | s27 | REF | 75% |
| 2068 | s27 | SNP | 80% |
| 2069 | s27 | REF | 75% |
| 2070 | s27 | SNP | 80% |
| 2071 | s27 | REF | 80% |
| 2072 | s27 | SNP | 85% |
| 2073 | s27 | SNP | 85% |
| 2074 | s27 | REF | 80% |
| 2075 | s27 | SNP | 85% |
| 2076 | s27 | REF | 80% |
| 2077 | s27 | REF | 80% |
| 2078 | s27 | REF | 80% |
| 2079 | s27 | SNP | 85% |
| 2080 | s27 | SNP | 85% |
| 2081 | s27 | REF | 80% |
| 2082 | s27 | SNP | 80% |
| 2083 | s27 | SNP | 80% |
| 2084 | s27 | REF | 75% |
| 2085 | s27 | REF | 80% |
| 2086 | s27 | SNP | 85% |
| 2087 | s27 | REF | 75% |
| 2088 | s27 | SNP | 80% |
| 2089 | s27 | REF | 80% |
| 2090 | s27 | SNP | 85% |
| 2091 | s27 | SNP | 80% |
| 2092 | s27 | SNP | 85% |
| 2093 | s27 | REF | 80% |
| 2094 | s27 | SNP | 80% |
| 2095 | s27 | REF | 75% |
| 2096 | s27 | REF | 80% |
| 2097 | s27 | SNP | 85% |
| 2098 | s27 | SNP | 85% |
| 2099 | s27 | REF | 80% |
| 2100 | s27 | SNP | 85% |
| 2101 | s27 | REF | 80% |
| 2102 | s27 | SNP | 85% |
| 2103 | s27 | REF | 80% |
| 2104 | s27 | REF | 75% |
| 2105 | s27 | SNP | 80% |
| 2106 | s27 | REF | 75% |
| 2107 | s27 | SNP | 80% |
| 2108 | s27 | REF | 75% |
| 2109 | s27 | SNP | 85% |
| 2110 | s27 | REF | 80% |
| 2111 | s27 | REF | 75% |
| 2112 | s4 | SNP | 40% |
| 2113 | s4 | SNP | 45% |
| 2114 | s4 | SNP | 50% |
| 2115 | s4 | SNP | 50% |
| 2116 | s4 | SNP | 55% |
| 2117 | s4 | SNP | 40% |
| 2118 | s4 | SNP | 35% |
| 2119 | s4 | SNP | 45% |
| 2120 | s4 | SNP | 50% |
| 2121 | s4 | SNP | 55% |
| 2122 | s4 | SNP | 50% |
| 2123 | s28 | SNP | 60% |
| 2124 | s28 | REF | 65% |
| 2125 | s28 | REF | 70% |
| 2126 | s28 | SNP | 65% |
| 2127 | s28 | SNP | 60% |
| 2128 | s28 | REF | 65% |
| 2129 | s28 | SNP | 65% |
| 2130 | s28 | REF | 65% |
| 2131 | s28 | SNP | 65% |
| 2132 | s28 | REF | 70% |
| 2133 | s28 | SNP | 65% |
| 2134 | s28 | REF | 70% |
| 2135 | s28 | REF | 70% |
| 2136 | s28 | SNP | 65% |
| 2137 | s28 | REF | 70% |
| 2138 | s28 | SNP | 65% |
| 2139 | s28 | SNP | 65% |
| 2140 | s28 | REF | 70% |
| 2141 | s28 | SNP | 65% |
| 2142 | s28 | REF | 70% |
| 2143 | s28 | SNP | 65% |
| 2144 | s28 | SNP | 65% |
| 2145 | s28 | SNP | 65% |
| 2146 | s28 | REF | 70% |
| 2147 | s28 | SNP | 65% |
| 2148 | s28 | SNP | 65% |
| 2149 | s28 | SNP | 65% |
| 2150 | s28 | REF | 70% |
| 2151 | s28 | REF | 70% |
| 2152 | s28 | SNP | 65% |
| 2153 | s28 | SNP | 65% |
| 2154 | s28 | REF | 70% |
| 2155 | s28 | SNP | 70% |
| 2156 | s28 | SNP | 65% |
| 2157 | s28 | SNP | 65% |
| 2158 | s28 | REF | 70% |
| 2159 | s28 | REF | 70% |
| 2160 | s28 | SNP | 65% |
| 2161 | s28 | REF | 70% |
| 2162 | s28 | REF | 70% |
| 2163 | s28 | SNP | 65% |
| 2164 | s28 | REF | 70% |
| 2165 | s28 | REF | 65% |
| 2166 | s28 | SNP | 60% |
| 2167 | s28 | REF | 65% |
| 2168 | s28 | SNP | 65% |
| 2169 | s28 | REF | 70% |
| 2170 | s28 | REF | 70% |
| 2171 | s28 | SNP | 65% |
| 2172 | s28 | REF | 65% |
| 2173 | s28 | SNP | 60% |
| 2174 | s28 | SNP | 60% |
| 2175 | s28 | REF | 65% |
| 2176 | s28 | SNP | 60% |
| 2177 | s28 | SNP | 65% |
| 2178 | s28 | REF | 70% |
| 2179 | s28 | REF | 70% |
| 2180 | s28 | SNP | 65% |
| 2181 | s3 | SNP | 40% |
| 2182 | s3 | SNP | 45% |
| 2183 | s3 | SNP | 50% |
| 2184 | s3 | SNP | 50% |
| 2185 | s3 | SNP | 55% |
| 2186 | s3 | SNP | 40% |
| 2187 | s3 | SNP | 35% |
| 2188 | s3 | SNP | 45% |
| 2189 | s3 | SNP | 55% |
| 2190 | s3 | SNP | 50% |
| 2191 | s3 | SNP | 55% |
| 2192 | s3 | SNP | 50% |
| 2193 | s3 | SNP | 55% |
| 2194 | s30 | SNP | 35% |
| 2195 | s30 | SNP | 50% |
| 2196 | s30 | REF | 45% |
| 2197 | s30 | REF | 45% |
| 2198 | s30 | SNP | 50% |
| 2199 | s30 | SNP | 65% |
| 2200 | s30 | REF | 60% |
| 2201 | s30 | REF | 45% |
| 2202 | s30 | REF | 35% |
| 2203 | s30 | SNP | 40% |
| 2204 | s30 | REF | 60% |
| 2205 | s30 | REF | 35% |
| 2206 | s30 | SNP | 40% |
| 2207 | s30 | SNP | 50% |
| 2208 | s30 | REF | 45% |
| 2209 | s30 | SNP | 40% |
| 2210 | s30 | REF | 35% |
| 2211 | s30 | SNP | 45% |
| 2212 | s30 | REF | 40% |
| 2213 | s30 | SNP | 35% |
| 2214 | s30 | SNP | 45% |
| 2215 | s30 | REF | 40% |
| 2216 | s30 | SNP | 50% |
| 2217 | s30 | REF | 45% |
| 2218 | s30 | SNP | 65% |
| 2219 | s30 | REF | 60% |
| 2220 | s30 | SNP | 35% |
| 2221 | s30 | SNP | 60% |
| 2222 | s30 | REF | 55% |
| 2223 | s30 | REF | 50% |
| 2224 | s30 | SNP | 55% |
| 2225 | s30 | REF | 50% |
| 2226 | s30 | REF | 35% |
| 2227 | s30 | SNP | 40% |
| 2228 | s30 | REF | 35% |
| 2229 | s30 | SNP | 55% |
| 2230 | s30 | REF | 50% |
| 2231 | s30 | SNP | 65% |
| 2232 | s30 | REF | 40% |
| 2233 | s30 | SNP | 45% |
| 2234 | s30 | REF | 40% |
| 2235 | s30 | SNP | 45% |
| 2236 | s30 | REF | 60% |
| 2237 | s30 | SNP | 35% |
| 2238 | s30 | SNP | 55% |
| 2239 | s30 | REF | 50% |
| 2240 | s30 | SNP | 65% |
| 2241 | s30 | REF | 55% |
| 2242 | s30 | SNP | 60% |
| 2243 | s30 | REF | 50% |
| 2244 | s30 | SNP | 55% |
| 2245 | s31 | SNP | 75% |
| 2246 | s31 | REF | 75% |
| 2247 | s31 | SNP | 55% |
| 2248 | s31 | REF | 50% |
| 2249 | s31 | REF | 70% |
| 2250 | s31 | REF | 70% |
| 2251 | s31 | REF | 70% |
| 2252 | s31 | SNP | 55% |
| 2253 | s31 | REF | 50% |
| 2254 | s31 | SNP | 55% |
| 2255 | s31 | REF | 70% |
| 2256 | s31 | SNP | 60% |
| 2257 | s31 | REF | 55% |
| 2258 | s31 | SNP | 70% |
| 2259 | s31 | REF | 65% |
| 2260 | s31 | SNP | 70% |
| 2261 | s31 | REF | 65% |
| 2262 | s31 | REF | 65% |
| 2263 | s31 | SNP | 75% |
| 2264 | s31 | REF | 70% |
| 2265 | s31 | SNP | 65% |
| 2266 | s31 | REF | 60% |
| 2267 | s31 | SNP | 75% |
| 2268 | s31 | REF | 70% |
| 2269 | s31 | REF | 55% |
| 2270 | s31 | SNP | 70% |
| 2271 | s31 | REF | 65% |
| 2272 | s31 | SNP | 55% |
| 2273 | s31 | REF | 50% |
| 2274 | s31 | SNP | 70% |
| 2275 | s31 | REF | 65% |
| 2276 | s31 | REF | 65% |
| 2277 | s31 | SNP | 70% |
| 2278 | s31 | REF | 70% |
| 2279 | s31 | REF | 70% |
| 2280 | s31 | REF | 70% |
| 2281 | s31 | SNP | 55% |
| 2282 | s31 | SNP | 75% |
| 2283 | s31 | REF | 50% |
| 2284 | s32 | SNP | 60% |
| 2285 | s32 | SNP | 70% |
| 2286 | s32 | SNP | 60% |
| 2287 | s32 | REF | 65% |
| 2288 | s32 | SNP | 70% |
| 2289 | s32 | REF | 70% |
| 2290 | s32 | SNP | 65% |
| 2291 | s32 | SNP | 70% |
| 2292 | s32 | SNP | 70% |
| 2293 | s32 | REF | 70% |
| 2294 | s32 | SNP | 65% |
| 2295 | s32 | SNP | 60% |
| 2296 | s32 | REF | 65% |
| 2297 | s32 | REF | 75% |
| 2298 | s32 | SNP | 70% |
| 2299 | s32 | SNP | 70% |
| 2300 | s32 | REF | 75% |
| 2301 | s32 | SNP | 65% |
| 2302 | s32 | REF | 70% |
| 2303 | s32 | REF | 65% |
| 2304 | s32 | SNP | 70% |
| 2305 | s32 | REF | 70% |
| 2306 | s32 | SNP | 65% |
| 2307 | s32 | SNP | 70% |
| 2308 | s32 | REF | 75% |
| 2309 | s32 | SNP | 65% |
| 2310 | s32 | SNP | 65% |
| 2311 | s32 | REF | 70% |
| 2312 | s32 | REF | 65% |
| 2313 | s32 | REF | 70% |
| 2314 | s32 | SNP | 65% |
| 2315 | s32 | SNP | 65% |
| 2316 | s32 | SNP | 70% |
| 2317 | s32 | REF | 75% |
| 2318 | s32 | REF | 70% |
| 2319 | s32 | SNP | 70% |
| 2320 | s32 | REF | 75% |
| 2321 | s32 | REF | 70% |
| 2322 | s32 | SNP | 65% |
| 2323 | s32 | REF | 70% |
| 2324 | s32 | SNP | 65% |
| 2325 | s32 | SNP | 60% |
| 2326 | s32 | REF | 70% |
| 2327 | s32 | SNP | 65% |
| 2328 | s32 | SNP | 60% |
| 2329 | s32 | REF | 70% |
| 2330 | s32 | SNP | 65% |
| 2331 | s32 | REF | 65% |
| 2332 | s32 | SNP | 60% |
| 2333 | s74 | SNP | 60% |
| 2334 | s74 | SNP | 60% |
| 2335 | s74 | SNP | 65% |
| 2336 | s74 | SNP | 65% |
| 2337 | s74 | SNP | 70% |
| 2338 | s74 | SNP | 60% |
| 2339 | s74 | SNP | 60% |
| 2340 | s33 | REF | 60% |
| 2341 | s33 | SNP | 65% |
| 2342 | s33 | SNP | 40% |
| 2343 | s33 | SNP | 65% |
| 2344 | s33 | REF | 60% |
| 2345 | s33 | REF | 40% |
| 2346 | s33 | SNP | 45% |
| 2347 | s33 | REF | 35% |
| 2348 | s33 | REF | 45% |
| 2349 | s33 | SNP | 50% |
| 2350 | s33 | SNP | 50% |
| 2351 | s33 | REF | 55% |
| 2352 | s33 | SNP | 60% |
| 2353 | s33 | REF | 45% |
| 2354 | s33 | REF | 50% |
| 2355 | s33 | SNP | 55% |
| 2356 | s33 | SNP | 45% |
| 2357 | s33 | REF | 60% |
| 2358 | s33 | SNP | 65% |
| 2359 | s33 | SNP | 65% |
| 2360 | s33 | REF | 60% |
| 2361 | s33 | SNP | 60% |
| 2362 | s33 | REF | 55% |
| 2363 | s33 | SNP | 55% |
| 2364 | s33 | REF | 50% |
| 2365 | s33 | REF | 55% |
| 2366 | s33 | SNP | 60% |
| 2367 | s33 | REF | 55% |
| 2368 | s33 | SNP | 60% |
| 2369 | s33 | SNP | 60% |
| 2370 | s33 | REF | 45% |
| 2371 | s33 | SNP | 50% |
| 2372 | s33 | SNP | 50% |
| 2373 | s33 | REF | 45% |
| 2374 | s33 | REF | 50% |
| 2375 | s33 | SNP | 55% |
| 2376 | s33 | SNP | 60% |
| 2377 | s33 | REF | 55% |
| 2378 | s33 | REF | 55% |
| 2379 | s33 | SNP | 60% |
| 2380 | s33 | REF | 40% |
| 2381 | s33 | REF | 55% |
| 2382 | s33 | SNP | 60% |
| 2383 | s33 | SNP | 55% |
| 2384 | s33 | SNP | 55% |
| 2385 | s33 | REF | 50% |
| 2386 | s34 | SNP | 35% |
| 2387 | s34 | REF | 45% |
| 2388 | s34 | SNP | 40% |
| 2389 | s34 | SNP | 45% |
| 2390 | s34 | REF | 50% |
| 2391 | s34 | SNP | 40% |
| 2392 | s34 | REF | 45% |
| 2393 | s34 | SNP | 45% |
| 2394 | s34 | REF | 50% |
| 2395 | s34 | SNP | 40% |
| 2396 | s34 | REF | 45% |
| 2397 | s34 | REF | 45% |
| 2398 | s34 | SNP | 40% |
| 2399 | s34 | REF | 40% |
| 2400 | s34 | SNP | 35% |
| 2401 | s34 | SNP | 35% |
| 2402 | s34 | SNP | 45% |
| 2403 | s34 | REF | 50% |
| 2404 | s34 | SNP | 45% |
| 2405 | s34 | REF | 50% |
| 2406 | s34 | REF | 55% |
| 2407 | s34 | SNP | 50% |
| 2408 | s34 | SNP | 40% |
| 2409 | s34 | SNP | 40% |
| 2410 | s34 | SNP | 45% |
| 2411 | s34 | SNP | 45% |
| 2412 | s34 | REF | 50% |
| 2413 | s34 | REF | 55% |
| 2414 | s34 | REF | 50% |
| 2415 | s34 | REF | 50% |
| 2416 | s34 | SNP | 45% |
| 2417 | s34 | SNP | 50% |
| 2418 | s34 | SNP | 35% |
| 2419 | s34 | SNP | 35% |
| 2420 | s34 | REF | 40% |
| 2421 | s34 | SNP | 35% |
| 2422 | s34 | SNP | 45% |
| 2423 | s34 | REF | 50% |
| 2424 | s34 | REF | 50% |
| 2425 | s34 | SNP | 45% |
| 2426 | s34 | REF | 45% |
| 2427 | s34 | SNP | 40% |
| 2428 | s34 | REF | 50% |
| 2429 | s34 | SNP | 45% |
| 2430 | s34 | SNP | 45% |
| 2431 | s34 | SNP | 35% |
| 2432 | s35 | SNP | 70% |
| 2433 | s35 | REF | 80% |
| 2434 | s35 | SNP | 75% |
| 2435 | s35 | REF | 70% |
| 2436 | s35 | SNP | 65% |
| 2437 | s35 | SNP | 75% |
| 2438 | s35 | REF | 80% |
| 2439 | s35 | REF | 90% |
| 2440 | s35 | SNP | 75% |
| 2441 | s35 | REF | 80% |
| 2442 | s35 | SNP | 80% |
| 2443 | s35 | REF | 85% |
| 2444 | s35 | SNP | 80% |
| 2445 | s35 | REF | 85% |
| 2446 | s35 | SNP | 70% |
| 2447 | s35 | REF | 75% |
| 2448 | s35 | REF | 85% |
| 2449 | s35 | SNP | 80% |
| 2450 | s35 | SNP | 70% |
| 2451 | s35 | REF | 75% |
| 2452 | s35 | REF | 85% |
| 2453 | s35 | REF | 75% |
| 2454 | s35 | SNP | 70% |
| 2455 | s35 | SNP | 80% |
| 2456 | s35 | REF | 75% |
| 2457 | s35 | SNP | 70% |
| 2458 | s35 | SNP | 70% |
| 2459 | s35 | REF | 75% |
| 2460 | s35 | REF | 75% |
| 2461 | s35 | SNP | 70% |
| 2462 | s35 | REF | 75% |
| 2463 | s35 | SNP | 70% |
| 2464 | s35 | REF | 75% |
| 2465 | s35 | SNP | 70% |
| 2466 | s35 | REF | 75% |
| 2467 | s35 | SNP | 70% |
| 2468 | s35 | REF | 75% |
| 2469 | s35 | SNP | 65% |
| 2470 | s35 | SNP | 85% |
| 2471 | s35 | REF | 85% |
| 2472 | s35 | REF | 70% |
| 2473 | s35 | SNP | 80% |
| 2474 | s36 | SNP | 60% |
| 2475 | s36 | SNP | 65% |
| 2476 | s36 | SNP | 70% |
| 2477 | s36 | SNP | 60% |
| 2478 | s36 | SNP | 65% |
| 2479 | s36 | SNP | 70% |
| 2480 | s36 | SNP | 70% |
| 2481 | s36 | SNP | 65% |
| 2482 | s36 | REF | 70% |
| 2483 | s36 | SNP | 65% |
| 2484 | s36 | REF | 70% |
| 2485 | s36 | SNP | 60% |
| 2486 | s36 | SNP | 60% |
| 2487 | s36 | SNP | 60% |
| 2488 | s36 | REF | 65% |
| 2489 | s36 | SNP | 60% |
| 2490 | s36 | SNP | 70% |
| 2491 | s36 | SNP | 65% |
| 2492 | s36 | REF | 70% |
| 2493 | s36 | SNP | 65% |
| 2494 | s36 | SNP | 70% |
| 2495 | s36 | REF | 65% |
| 2496 | s36 | REF | 70% |
| 2497 | s36 | REF | 70% |
| 2498 | s36 | SNP | 65% |
| 2499 | s36 | SNP | 60% |
| 2500 | s36 | SNP | 60% |
| 2501 | s36 | REF | 65% |
| 2502 | s36 | SNP | 55% |
| 2503 | s36 | SNP | 60% |
| 2504 | s36 | SNP | 65% |
| 2505 | s36 | REF | 70% |
| 2506 | s36 | SNP | 60% |
| 2507 | s36 | SNP | 55% |
| 2508 | s7 | SNP | 40% |
| 2509 | s7 | SNP | 45% |
| 2510 | s7 | SNP | 50% |
| 2511 | s7 | SNP | 45% |
| 2512 | s7 | SNP | 35% |
| 2513 | s7 | SNP | 50% |
| 2514 | s7 | SNP | 40% |
| 2515 | s29 | SNP | 65% |
| 2516 | s29 | SNP | 65% |
| 2517 | s29 | SNP | 65% |
| 2518 | s29 | SNP | 65% |
| 2519 | s29 | SNP | 65% |
| 2520 | s29 | SNP | 75% |
| 2521 | s29 | SNP | 70% |
| 2522 | s29 | SNP | 65% |
| 2523 | s29 | SNP | 65% |
| 2524 | s29 | SNP | 75% |
| 2525 | s29 | SNP | 75% |
| 2526 | s29 | SNP | 75% |
| 2527 | s29 | SNP | 65% |
| 2528 | s29 | SNP | 75% |
| 2529 | s29 | REF | 65% |
| 2530 | s29 | SNP | 75% |
| 2531 | s29 | SNP | 75% |
| 2532 | s40 | SNP | 35% |
| 2533 | s40 | SNP | 35% |
| 2534 | s40 | SNP | 35% |
| 2535 | s40 | REF | 35% |
| 2536 | s40 | REF | 35% |
| 2537 | s40 | SNP | 35% |
| 2538 | s40 | SNP | 40% |
| 2539 | s40 | REF | 40% |
| 2540 | s40 | REF | 35% |
| 2541 | s40 | REF | 35% |
| 2542 | s40 | SNP | 35% |
| 2543 | s40 | SNP | 40% |
| 2544 | s40 | REF | 40% |
| 2545 | s40 | SNP | 40% |
| 2546 | s40 | SNP | 50% |
| 2547 | s40 | SNP | 45% |
| 2548 | s40 | REF | 45% |
| 2549 | s41 | SNP | 65% |
| 2550 | s41 | REF | 70% |
| 2551 | s41 | REF | 60% |
| 2552 | s41 | SNP | 55% |
| 2553 | s41 | REF | 80% |
| 2554 | s41 | SNP | 75% |
| 2555 | s41 | SNP | 70% |
| 2556 | s41 | REF | 75% |
| 2557 | s41 | SNP | 75% |
| 2558 | s41 | REF | 65% |
| 2559 | s41 | SNP | 60% |
| 2560 | s41 | REF | 80% |
| 2561 | s41 | SNP | 75% |
| 2562 | s41 | REF | 70% |
| 2563 | s41 | SNP | 65% |
| 2564 | s41 | REF | 70% |
| 2565 | s41 | SNP | 65% |
| 2566 | s41 | REF | 70% |
| 2567 | s41 | SNP | 65% |
| 2568 | s41 | REF | 70% |
| 2569 | s41 | SNP | 65% |
| 2570 | s41 | REF | 65% |
| 2571 | s41 | SNP | 60% |
| 2572 | s41 | REF | 65% |
| 2573 | s41 | REF | 80% |
| 2574 | s41 | SNP | 75% |
| 2575 | s41 | REF | 80% |
| 2576 | s41 | REF | 80% |
| 2577 | s41 | SNP | 75% |
| 2578 | s41 | SNP | 60% |
| 2579 | s41 | SNP | 75% |
| 2580 | s41 | REF | 80% |
| 2581 | s41 | SNP | 75% |
| 2582 | s41 | REF | 80% |
| 2583 | s41 | REF | 80% |
| 2584 | s41 | SNP | 75% |
| 2585 | s41 | REF | 80% |
| 2586 | s41 | SNP | 75% |
| 2587 | s41 | SNP | 75% |
| 2588 | s41 | SNP | 60% |
| 2589 | s41 | REF | 65% |
| 2590 | s41 | REF | 80% |
| 2591 | s41 | REF | 80% |
| 2592 | s41 | SNP | 75% |
| 2593 | s41 | SNP | 65% |
| 2594 | s41 | REF | 70% |
| 2595 | s41 | SNP | 65% |
| 2596 | s41 | REF | 70% |
| 2597 | s41 | REF | 70% |
| 2598 | s41 | SNP | 65% |
| 2599 | s41 | SNP | 75% |
| 2600 | s41 | REF | 80% |
| 2601 | s41 | SNP | 60% |
| 2602 | s41 | REF | 65% |
| 2603 | s41 | REF | 80% |
| 2604 | s41 | SNP | 75% |
| 2605 | s41 | SNP | 75% |
| 2606 | s41 | REF | 80% |
| 2607 | s42 | REF | 75% |
| 2608 | s42 | REF | 85% |
| 2609 | s42 | REF | 60% |
| 2610 | s42 | SNP | 55% |
| 2611 | s42 | SNP | 55% |
| 2612 | s42 | SNP | 60% |
| 2613 | s42 | REF | 80% |
| 2614 | s42 | SNP | 75% |
| 2615 | s42 | REF | 75% |
| 2616 | s42 | SNP | 70% |
| 2617 | s42 | REF | 60% |
| 2618 | s42 | SNP | 55% |
| 2619 | s42 | REF | 55% |
| 2620 | s42 | REF | 85% |
| 2621 | s42 | REF | 85% |
| 2622 | s42 | SNP | 80% |
| 2623 | s42 | REF | 80% |
| 2624 | s42 | REF | 60% |
| 2625 | s42 | SNP | 80% |
| 2626 | s42 | REF | 85% |
| 2627 | s42 | REF | 65% |
| 2628 | s42 | SNP | 60% |
| 2629 | s42 | SNP | 80% |
| 2630 | s42 | SNP | 65% |
| 2631 | s42 | SNP | 80% |
| 2632 | s42 | REF | 85% |
| 2633 | s42 | REF | 60% |
| 2634 | s42 | SNP | 55% |
| 2635 | s42 | SNP | 55% |
| 2636 | s42 | REF | 60% |
| 2637 | s42 | SNP | 65% |
| 2638 | s42 | REF | 70% |
| 2639 | s42 | REF | 60% |
| 2640 | s42 | REF | 65% |
| 2641 | s42 | SNP | 70% |
| 2642 | s42 | REF | 60% |
| 2643 | s42 | SNP | 60% |
| 2644 | s42 | REF | 65% |
| 2645 | s42 | SNP | 75% |
| 2646 | s42 | REF | 80% |
| 2647 | s42 | SNP | 60% |
| 2648 | s42 | REF | 65% |
| 2649 | s42 | SNP | 80% |
| 2650 | s42 | SNP | 65% |
| 2651 | s42 | REF | 70% |
| 2652 | s42 | SNP | 65% |
| 2653 | s42 | REF | 85% |
| 2654 | s42 | REF | 65% |
| 2655 | s42 | SNP | 60% |
| 2656 | s42 | REF | 65% |
| 2657 | s42 | SNP | 60% |
| 2658 | s42 | REF | 85% |
| 2659 | s42 | SNP | 80% |
| 2660 | s42 | SNP | 75% |
| 2661 | s42 | SNP | 60% |
| 2662 | s42 | SNP | 60% |
| 2663 | s42 | REF | 65% |
| 2664 | s75 | SNP | 45% |
| 2665 | s75 | SNP | 35% |
| 2666 | s75 | SNP | 45% |
| 2667 | s75 | SNP | 35% |
| 2668 | s75 | REF | 40% |
| 2669 | s75 | REF | 35% |
| 2670 | s75 | SNP | 40% |
| 2671 | s75 | SNP | 45% |
| 2672 | s75 | SNP | 35% |
| 2673 | s75 | SNP | 45% |
| 2674 | s75 | SNP | 45% |
| 2675 | s75 | SNP | 35% |
| 2676 | s75 | SNP | 45% |
| 2677 | s43 | SNP | 50% |
| 2678 | s43 | SNP | 65% |
| 2679 | s43 | REF | 60% |
| 2680 | s43 | REF | 65% |
| 2681 | s43 | SNP | 70% |
| 2682 | s43 | SNP | 75% |
| 2683 | s43 | REF | 70% |
| 2684 | s43 | SNP | 75% |
| 2685 | s43 | REF | 55% |
| 2686 | s43 | SNP | 70% |
| 2687 | s43 | REF | 65% |
| 2688 | s43 | SNP | 75% |
| 2689 | s43 | REF | 70% |
| 2690 | s43 | REF | 70% |
| 2691 | s43 | SNP | 70% |
| 2692 | s43 | SNP | 75% |
| 2693 | s43 | SNP | 75% |
| 2694 | s43 | REF | 70% |
| 2695 | s43 | SNP | 65% |
| 2696 | s43 | REF | 60% |
| 2697 | s43 | SNP | 65% |
| 2698 | s43 | REF | 70% |
| 2699 | s43 | SNP | 65% |
| 2700 | s43 | REF | 60% |
| 2701 | s43 | SNP | 65% |
| 2702 | s43 | REF | 70% |
| 2703 | s43 | SNP | 75% |
| 2704 | s43 | SNP | 65% |
| 2705 | s43 | SNP | 75% |
| 2706 | s43 | REF | 70% |
| 2707 | s43 | SNP | 70% |
| 2708 | s43 | REF | 70% |
| 2709 | s43 | SNP | 75% |
| 2710 | s43 | SNP | 65% |
| 2711 | s43 | REF | 60% |
| 2712 | s43 | REF | 60% |
| 2713 | s43 | REF | 70% |
| 2714 | s43 | SNP | 75% |
| 2715 | s43 | SNP | 60% |
| 2716 | s43 | REF | 60% |
| 2717 | s43 | SNP | 80% |
| 2718 | s43 | SNP | 65% |
| 2719 | s43 | SNP | 65% |
| 2720 | s43 | SNP | 65% |
| 2721 | s43 | SNP | 80% |
| 2722 | s43 | REF | 75% |
| 2723 | s43 | REF | 65% |
| 2724 | s43 | SNP | 60% |
| 2725 | s43 | REF | 55% |
| 2726 | s43 | SNP | 75% |
| 2727 | s43 | REF | 70% |
| 2728 | s43 | SNP | 65% |
| 2729 | s43 | REF | 60% |
| 2730 | s43 | REF | 70% |
| 2731 | s43 | SNP | 75% |
| 2732 | s43 | SNP | 65% |
| 2733 | s43 | SNP | 75% |
| 2734 | s43 | REF | 70% |
| 2735 | s43 | REF | 70% |
| 2736 | s43 | SNP | 75% |
| 2737 | s44 | SNP | 35% |
| 2738 | s44 | SNP | 35% |
| 2739 | s44 | REF | 35% |
| 2740 | s44 | SNP | 40% |
| 2741 | s44 | REF | 35% |
| 2742 | s44 | SNP | 45% |
| 2743 | s44 | REF | 40% |
| 2744 | s44 | SNP | 45% |
| 2745 | s44 | REF | 35% |
| 2746 | s44 | REF | 45% |
| 2747 | s44 | SNP | 45% |
| 2748 | s44 | REF | 45% |
| 2749 | s44 | REF | 35% |
| 2750 | s44 | REF | 40% |
| 2751 | s44 | REF | 40% |
| 2752 | s44 | REF | 60% |
| 2753 | s44 | REF | 35% |
| 2754 | s44 | REF | 40% |
| 2755 | s44 | REF | 45% |
| 2756 | s44 | SNP | 45% |
| 2757 | s44 | REF | 45% |
| 2758 | s44 | SNP | 50% |
| 2759 | s2 | SNP | 40% |
| 2760 | s2 | SNP | 45% |
| 2761 | s2 | SNP | 50% |
| 2762 | s2 | SNP | 50% |
| 2763 | s2 | SNP | 55% |
| 2764 | s2 | SNP | 40% |
| 2765 | s2 | SNP | 35% |
| 2766 | s2 | REF | 65% |
| 2767 | s2 | SNP | 45% |
| 2768 | s2 | SNP | 55% |
| 2769 | s2 | SNP | 55% |
| 2770 | s2 | SNP | 60% |
| 2771 | s2 | REF | 65% |
| 2772 | s2 | SNP | 60% |
| 2773 | s2 | REF | 60% |
| 2774 | s2 | SNP | 60% |
| 2775 | s45 | SNP | 40% |
| 2776 | s45 | REF | 45% |
| 2777 | s45 | REF | 45% |
| 2778 | s45 | SNP | 40% |
| 2779 | s45 | REF | 45% |
| 2780 | s45 | SNP | 40% |
| 2781 | s45 | SNP | 40% |
| 2782 | s45 | REF | 45% |
| 2783 | s45 | REF | 55% |
| 2784 | s45 | SNP | 45% |
| 2785 | s45 | REF | 50% |
| 2786 | s45 | REF | 45% |
| 2787 | s45 | REF | 45% |
| 2788 | s45 | REF | 50% |
| 2789 | s45 | SNP | 45% |
| 2790 | s45 | REF | 50% |
| 2791 | s45 | SNP | 45% |
| 2792 | s45 | REF | 50% |
| 2793 | s45 | SNP | 45% |
| 2794 | s45 | REF | 55% |
| 2795 | s45 | SNP | 50% |
| 2796 | s45 | REF | 50% |
| 2797 | s45 | SNP | 45% |
| 2798 | s45 | SNP | 40% |
| 2799 | s45 | REF | 45% |
| 2800 | s45 | SNP | 45% |
| 2801 | s45 | REF | 50% |
| 2802 | s45 | REF | 45% |
| 2803 | s45 | SNP | 40% |
| 2804 | s45 | SNP | 45% |
| 2805 | s45 | REF | 50% |
| 2806 | s45 | REF | 50% |
| 2807 | s45 | REF | 50% |
| 2808 | s45 | SNP | 45% |
| 2809 | s45 | REF | 50% |
| 2810 | s45 | SNP | 45% |
| 2811 | s45 | REF | 50% |
| 2812 | s45 | SNP | 50% |
| 2813 | s45 | REF | 55% |
| 2814 | s45 | REF | 55% |
| 2815 | s45 | SNP | 50% |
| 2816 | s45 | SNP | 45% |
| 2817 | s45 | SNP | 45% |
| 2818 | s45 | SNP | 45% |
| 2819 | s45 | REF | 50% |
| 2820 | s45 | REF | 50% |
| 2821 | s45 | SNP | 40% |
| 2822 | s45 | SNP | 45% |
| 2823 | s45 | SNP | 45% |
| 2824 | s45 | REF | 50% |
| 2825 | s45 | REF | 50% |
| 2826 | s45 | SNP | 45% |
| 2827 | s45 | REF | 55% |
| 2828 | s45 | SNP | 50% |
| 2829 | s45 | SNP | 45% |
| 2830 | s45 | REF | 50% |
| 2831 | s45 | REF | 50% |
| 2832 | s45 | SNP | 45% |
| 2833 | s45 | REF | 50% |
| 2834 | s45 | REF | 50% |
| 2835 | s45 | SNP | 45% |
| 2836 | s45 | SNP | 40% |
| 2837 | s45 | REF | 45% |
| 2838 | s45 | REF | 45% |
| 2839 | s45 | SNP | 40% |
| 2840 | s45 | REF | 50% |
| 2841 | s45 | SNP | 45% |
| 2842 | s45 | REF | 45% |
| 2843 | s45 | SNP | 40% |
| 2844 | s76 | SNP | 70% |
| 2845 | s76 | SNP | 50% |
| 2846 | s76 | SNP | 75% |
| 2847 | s76 | SNP | 60% |
| 2848 | s76 | SNP | 55% |
| 2849 | s76 | SNP | 70% |
| 2850 | s76 | SNP | 55% |
| 2851 | s76 | SNP | 50% |
| 2852 | s46 | SNP | 55% |
| 2853 | s46 | REF | 60% |
| 2854 | s46 | SNP | 60% |
| 2855 | s46 | REF | 65% |
| 2856 | s46 | SNP | 60% |
| 2857 | s46 | REF | 65% |
| 2858 | s46 | SNP | 65% |
| 2859 | s46 | REF | 70% |
| 2860 | s46 | SNP | 65% |
| 2861 | s46 | SNP | 60% |
| 2862 | s46 | REF | 65% |
| 2863 | s46 | SNP | 65% |
| 2864 | s46 | REF | 70% |
| 2865 | s46 | SNP | 65% |
| 2866 | s46 | SNP | 60% |
| 2867 | s46 | REF | 65% |
| 2868 | s46 | REF | 65% |
| 2869 | s46 | REF | 75% |
| 2870 | s46 | REF | 60% |
| 2871 | s46 | REF | 70% |
| 2872 | s46 | REF | 70% |
| 2873 | s46 | SNP | 65% |
| 2874 | s46 | REF | 65% |
| 2875 | s46 | REF | 70% |
| 2876 | s46 | SNP | 60% |
| 2877 | s46 | SNP | 60% |
| 2878 | s46 | SNP | 70% |
| 2879 | s46 | REF | 75% |
| 2880 | s46 | REF | 75% |
| 2881 | s46 | SNP | 70% |
| 2882 | s46 | REF | 65% |
| 2883 | s46 | SNP | 60% |
| 2884 | s46 | REF | 70% |
| 2885 | s46 | REF | 70% |
| 2886 | s46 | SNP | 70% |
| 2887 | s46 | REF | 75% |
| 2888 | s46 | REF | 75% |
| 2889 | s46 | SNP | 70% |
| 2890 | s46 | SNP | 70% |
| 2891 | s46 | REF | 75% |
| 2892 | s46 | REF | 75% |
| 2893 | s46 | SNP | 70% |
| 2894 | s46 | REF | 70% |
| 2895 | s46 | SNP | 65% |
| 2896 | s46 | REF | 65% |
| 2897 | s46 | REF | 65% |
| 2898 | s46 | SNP | 60% |
| 2899 | s46 | SNP | 60% |
| 2900 | s46 | SNP | 55% |
| 2901 | s46 | SNP | 65% |
| 2902 | s46 | REF | 70% |
| 2903 | s46 | SNP | 60% |
| 2904 | s46 | REF | 65% |
| 2905 | s46 | SNP | 60% |
| 2906 | s46 | REF | 65% |
| 2907 | s47 | REF | 75% |
| 2908 | s47 | SNP | 70% |
| 2909 | s47 | REF | 70% |
| 2910 | s47 | SNP | 65% |
| 2911 | s47 | SNP | 70% |
| 2912 | s47 | REF | 75% |
| 2913 | s47 | REF | 80% |
| 2914 | s47 | SNP | 75% |
| 2915 | s47 | SNP | 75% |
| 2916 | s47 | SNP | 75% |
| 2917 | s47 | REF | 75% |
| 2918 | s47 | SNP | 70% |
| 2919 | s47 | SNP | 70% |
| 2920 | s47 | REF | 75% |
| 2921 | s47 | SNP | 75% |
| 2922 | s47 | REF | 80% |
| 2923 | s47 | REF | 70% |
| 2924 | s47 | SNP | 65% |
| 2925 | s47 | SNP | 50% |
| 2926 | s47 | REF | 80% |
| 2927 | s47 | SNP | 75% |
| 2928 | s47 | REF | 75% |
| 2929 | s47 | REF | 55% |
| 2930 | s47 | SNP | 50% |
| 2931 | s47 | REF | 80% |
| 2932 | s47 | SNP | 75% |
| 2933 | s47 | SNP | 75% |
| 2934 | s47 | REF | 80% |
| 2935 | s47 | REF | 80% |
| 2936 | s47 | SNP | 75% |
| 2937 | s47 | SNP | 75% |
| 2938 | s47 | REF | 80% |
| 2939 | s47 | SNP | 60% |
| 2940 | s47 | REF | 80% |
| 2941 | s47 | REF | 65% |
| 2942 | s47 | SNP | 75% |
| 2943 | s47 | SNP | 75% |
| 2944 | s47 | REF | 80% |
| 2945 | s47 | SNP | 65% |
| 2946 | s47 | REF | 70% |
| 2947 | s47 | SNP | 75% |
| 2948 | s47 | REF | 80% |
| 2949 | s47 | SNP | 80% |
| 2950 | s47 | REF | 85% |
| 2951 | s47 | SNP | 60% |
| 2952 | s47 | REF | 85% |
| 2953 | s47 | SNP | 80% |
| 2954 | s47 | SNP | 75% |
| 2955 | s47 | REF | 80% |
| 2956 | s47 | REF | 65% |
| 2957 | s47 | SNP | 60% |
| 2958 | s47 | SNP | 75% |
| 2959 | s47 | REF | 80% |
| 2960 | s47 | REF | 80% |
| 2961 | s47 | SNP | 70% |
| 2962 | s47 | SNP | 75% |
| 2963 | s47 | REF | 55% |
| 2964 | s47 | SNP | 50% |
| 2965 | s48 | SNP | 65% |
| 2966 | s48 | REF | 70% |
| 2967 | s48 | SNP | 65% |
| 2968 | s48 | REF | 70% |
| 2969 | s48 | SNP | 65% |
| 2970 | s48 | SNP | 60% |
| 2971 | s48 | SNP | 65% |
| 2972 | s48 | REF | 70% |
| 2973 | s48 | SNP | 55% |
| 2974 | s48 | SNP | 55% |
| 2975 | s48 | SNP | 60% |
| 2976 | s48 | SNP | 55% |
| 2977 | s48 | SNP | 65% |
| 2978 | s48 | REF | 70% |
| 2979 | s48 | SNP | 65% |
| 2980 | s48 | SNP | 65% |
| 2981 | s48 | REF | 65% |
| 2982 | s48 | SNP | 55% |
| 2983 | s48 | SNP | 55% |
| 2984 | s48 | REF | 65% |
| 2985 | s48 | SNP | 60% |
| 2986 | s48 | SNP | 60% |
| 2987 | s48 | SNP | 60% |
| 2988 | s48 | REF | 65% |
| 2989 | s48 | SNP | 60% |
| 2990 | s48 | SNP | 55% |
| 2991 | s48 | REF | 60% |
| 2992 | s49 | SNP | 55% |
| 2993 | s49 | REF | 50% |
| 2994 | s49 | SNP | 65% |
| 2995 | s49 | REF | 60% |
| 2996 | s49 | SNP | 65% |
| 2997 | s49 | REF | 60% |
| 2998 | s49 | SNP | 50% |
| 2999 | s49 | REF | 45% |
| 3000 | s49 | REF | 55% |
| 3001 | s49 | SNP | 60% |
| 3002 | s49 | REF | 55% |
| 3003 | s49 | REF | 45% |
| 3004 | s49 | SNP | 50% |
| 3005 | s49 | SNP | 55% |
| 3006 | s49 | REF | 50% |
| 3007 | s49 | SNP | 60% |
| 3008 | s49 | SNP | 60% |
| 3009 | s49 | REF | 55% |
| 3010 | s49 | REF | 55% |

[0150] Examples are provided below to facilitate a more complete understanding of the invention. The following examples illustrate the exemplary modes of making and practicing the invention. However, the scope of the invention is not limited to specific embodiments disclosed in these Examples, which are for purposes of illustration only.

### Experimental Details

### EXAMPLE 1

### GUCY2D Correction Anaylsis

[0151] Guide sequences comprising 17-20 nucleotides in the sequences of 17-20 contiguous nucleotides set forth in SEQ ID NOs: 1-3010 are screened for high on target activity. On target activity is determined by DNA capillary electrophoresis analysis.

[0152] According to DNA capillary electrophoresis analysis, guide sequences comprising 17-20 nucleotides in the sequences of 17-20 contiguous nucleotides set forth in SEQ ID NOs: 1-3010 are found to be suitable for correction of the GUCY2D gene.

### Discussion

[0153] The guide sequences of the present invention are determined to be suitable for targeting the GUCY2D gene.

### REFERENCES

[0154] 1. Ahmad and Allen (1992) “Antibody-mediated Specific Binging and Cytotoxicity of Lipsome-entrapped Doxorubicin to Lung Cancer Cells in Vitro”, Cancer Research 52:4817-20
[0155] 2. Anders (1992) “Human gene therapy”, Science 256:808-13
[0156] 3. Basha et al. (2011) “Influence of Cationic Lipid Composition on Gene Silencing Properties of Lipid Nanoparticle Formulations of siRNA in Antigen-Presenting Cells”, Mol. Ther. 19(12):2186-200
[0157] 4. Behr (1994) “Gene transfer with synthetic cationic amphiphiles: Prospects for gene therapy”, Bioconjuage Chem 5:382-89
[0158] 5. Blaese (1995) “Vectors in cancer therapy: how will they deliver”, Cancer Gene Ther. 2:291-97
[0159] 6. Blaese et al. (1995) “T lympocyte-directed gene therapy for ADA-SCID: initial trial results after 4 years”, Science 270(5235):475-80
[0160] 7. Buchschacher and Panganiban (1992) “Human immunodeficiency virus vectors for inducible expression of foreign genes”, J. Virol. 66:2731-39
[0161] 8. Burstein et al. (2017) “New CRISPR-Cas systems from uncultivated microbes”, Nature 542:237-41
[0162] 9. Chung et al. (2006) “Agrobacterium is not alone: gene transfer to plants by viruses and other bacteria”, Trends Plant Sci. 11(1):1-4
[0163] 10. Coelho et al. (2013) “Safety and Efficacy of RNAi Therapy for Transthyretin Amyloidosis”, N Engl J. Med 369:819-29
[0164] 11. Crystal (1995) “Transfer of genes to humans: early lessons and obstacles to success”, Science 270(5235):404-10
[0165] 12. Dillon (1993) “Regulation gene expression in gene therapy” Trends in Biotechnology
[0166] 13. Dranoff et al. (1997) “A phase I study of vaccination with autologous, irradiated melanoma cells engineered to secrete human granulocyte macrophage colony stimulating factor”, Hum. Gene Ther. 8(1):111-23
[0167] 14. Dunbar et al. (1995) “Retrovirally marked CD34-enriched peripheral blood and bone marrow cells contribute to long-term engraftment after autologous transplantation”, Blood 85:3048-57
[0168] 15. Ellem et al. (1997) “A case report: immune responses and clinical course of the first human use of ganulocyte/macrophage-colony-stimulating-factor-tranduced autologous melanoma cells for immunotherapy”, Cancer Immunol Immunother 44:10-20
[0169] 16. Gao and Huang (1995) “Cationic liposome-mediated gene transfer” Gene Ther. 2(10):710-22
[0170] 17. Haddada et al. (1995) “Gene Therapy Using Adenovirus Vectors”, in: The Molecular Repertoire of Adenoviruses III: Biology and Pathogenesis, ed. Doerfler and Bohm, pp. 297-306
[0171] 18. Han et al. (1995) “Ligand-directed retro-viral targeting of human breast cancer cells”, Proc Natl Acad Sci U.S.A. 92(21):9747-51
[0172] 19. Inaba et al. (1992) “Generation of large numbers of dendritic cells from mouse bone marrow cultures supplemented with granulocyte/macrophage colony-stimulating factor”, J Exp Med. 176(6):1693-702
[0173] 20. Jinek et al. (2012) “A programmable dual-RNA-guided DNA endonuclease in adaptive bacterial immunity,” Science 337(6096):816-21
[0174] 21. Johan et al. (1992) “GLVR1, a receptor for gibbon ape leukemia virus, is homologous to a phosphate permease of Neurospora crassa and is expressed at high levels in the brain and thymus”, J Virol 66(3):1635-40
[0175] 22. Judge et al. (2006) “Design of noninflammatory synthetic siRNA mediating potent gene silencing in vivo”, Mol Ther. 13(3):494-505
[0176] 23. Kohn et al. (1995) “Engraftment of gene-modified umbilical cord blood cells in neonates with adnosine deaminase deficiency”, Nature Medicine 1:1017-23
[0177] 24. Kremer and Perricaudet (1995) “Adenovirus and adeno-associated virus mediated gene transfer”, Br. Med. Bull. 51(1):31-44
[0178] 25. Macdiarmid et al. (2009) “Sequential treatment of drug-resistant tumors with targeted minicells containing siRNA or a cytotoxic drug”, Nat Biotehcnol. 27(7):643-51
[0179] 26. Malech et al. (1997) “Prolonged production of NADPH oxidase-corrected granulocyes after gene therapy of chronic granulomatous disease”, PNAS 94(22):12133-38
[0180] 27. Miller et al. (1991) “Construction and properties of retrovirus packaging cells based on gibbon ape leukemia virus”, J Virol. 65(5):2220-24
[0181] 28. Miller (1992) “Human gene therapy comes of age”, Nature 357:455-60
[0182] 29. Mitani and Caskey (1993) “Delivering therapeutic genes — matching approach and application”, Trends in Biotechnology 11(5):162-66
[0183] 30. Nabel and Felgner (1993) “Direct gene transfer for immunotherapy and immunization”, Trends in Biotechnology 11(5):211-15
[0184] 31. Remy et al. (1994) “Gene Transfer with a Series of Lipphilic DNA-Binding Molecules”, Bioconjugate Chem. 5(6):647-54
[0185] 32. Sentmanat et al. (2018) “A Survey of Validation Strategies for CRISPR-Cas9 Editing”, Scientific Reports 8:888, doi:10.1038/s41598-018-19441-8
[0186] 33. Sommerfelt et al. (1990) “Localization of the receptor gene for type D simian retroviruses on human chromosome 19”, J. Virol. 64(12):6214-20
[0187] 34. Van Brunt (1988) “Molecular framing: transgenic animals as bioactors” Biotechnology 6:1149-54
[0188] 35. Vigne et al. (1995) “Third-generation adenovectors for gene therapy”, Restorative Neurology and Neuroscience 8(1,2): 35-36
[0189] 36. Wilson et al. (1989) “Formation of infectious hybrid virion with gibbon ape leukemia virus and human T-cell leukemia virus retroviral envelope glycoproteins and the gag and pol proteins of Moloney murine leukemia virus”, J. Virol. 63:2374-78
[0190] 37. Yu et al. (1994) “Progress towards gene therapy for HIV infection”, Gene Ther. 1(1):13-26
[0191] 38. Zetsche et al. (2015) “Cpf1is a single RNA-guided endonuclease of a class 2 CRIPSR-Cas system” Cell 163(3):759-71
[0192] 39. Zuris et al. (2015) “Cationic lipid-mediated delivery of proteins enables efficient protein based genome editing in vitro and in vivo” Nat Biotechnol. 33(1):73-80

The application's sequence listing, which the Patent Office published only in electronic form, follows.

SEQUENCE LISTING (3010 sequences)

SEQ ID NO: 1 - RNA, 20 nt, Artificial Sequence
  synthesized
ugugcuucuccuuagggucu

SEQ ID NO: 2 - RNA, 20 nt, Artificial Sequence
  synthesized
uugugcuucuccuuaggguc

SEQ ID NO: 3 - RNA, 20 nt, Artificial Sequence
  synthesized
uuugugcuucuccuuagggu

SEQ ID NO: 4 - RNA, 20 nt, Artificial Sequence
  synthesized
cuggaggaauaaauaaggga

SEQ ID NO: 5 - RNA, 20 nt, Artificial Sequence
  synthesized
ucaaucuucuuucccagacc

SEQ ID NO: 6 - RNA, 20 nt, Artificial Sequence
  synthesized
uggaggaauaaauaagggac

SEQ ID NO: 7 - RNA, 20 nt, Artificial Sequence
  synthesized
aaucuuggugucucggaguc

SEQ ID NO: 8 - RNA, 20 nt, Artificial Sequence
  synthesized
cuuggugucucggagucugu

SEQ ID NO: 9 - RNA, 20 nt, Artificial Sequence
  synthesized
ucuuggugucucggagucug

SEQ ID NO: 10 - RNA, 20 nt, Artificial Sequence
  synthesized
uuuauccagaugucgccacu

SEQ ID NO: 11 - RNA, 20 nt, Artificial Sequence
  synthesized
aauacgucucggcaauguuc

SEQ ID NO: 12 - RNA, 20 nt, Artificial Sequence
  synthesized
acaauacgucucggcaaugu

SEQ ID NO: 13 - RNA, 20 nt, Artificial Sequence
  synthesized
gaggguucccagaggucagu

SEQ ID NO: 14 - RNA, 20 nt, Artificial Sequence
  synthesized
gcccugucaauuacuagcug

SEQ ID NO: 15 - RNA, 20 nt, Artificial Sequence
  synthesized
ucauguauauaacugacccu

SEQ ID NO: 16 - RNA, 20 nt, Artificial Sequence
  synthesized
aggacccccaccgugaacac

SEQ ID NO: 17 - RNA, 20 nt, Artificial Sequence
  synthesized
gacccccaccgugaacacgg

SEQ ID NO: 18 - RNA, 20 nt, Artificial Sequence
  synthesized
cuagggggcagcagucacca

SEQ ID NO: 19 - RNA, 20 nt, Artificial Sequence
  synthesized
uagggggcagcagucaccag

SEQ ID NO: 20 - RNA, 20 nt, Artificial Sequence
  synthesized
gugcaagguccagaagagcc

SEQ ID NO: 21 - RNA, 20 nt, Artificial Sequence
  synthesized
cgggacaccuggcuugggug

SEQ ID NO: 22 - RNA, 20 nt, Artificial Sequence
  synthesized
gggacaccuggcuugggugg

SEQ ID NO: 23 - RNA, 20 nt, Artificial Sequence
  synthesized
aaacuggcugcuucuccugu

SEQ ID NO: 24 - RNA, 20 nt, Artificial Sequence
  synthesized
cuggcugcuucuccuguggg

SEQ ID NO: 25 - RNA, 20 nt, Artificial Sequence
  synthesized
ugggcaaguucccugauuau

SEQ ID NO: 26 - RNA, 20 nt, Artificial Sequence
  synthesized
uagggguugcaauuucccau

SEQ ID NO: 27 - RNA, 20 nt, Artificial Sequence
  synthesized
uuggaagaaucuaggggcau

SEQ ID NO: 28 - RNA, 20 nt, Artificial Sequence
  synthesized
aagcggagaaucccugaccc

SEQ ID NO: 29 - RNA, 20 nt, Artificial Sequence
  synthesized
gcccugaguccagcagggga

SEQ ID NO: 30 - RNA, 20 nt, Artificial Sequence
  synthesized
cucgccacccagcagcaccg

SEQ ID NO: 31 - RNA, 20 nt, Artificial Sequence
  synthesized
uccucgccacccagcagcac

SEQ ID NO: 32 - RNA, 20 nt, Artificial Sequence
  synthesized
ucgccacccagcagcaccga

SEQ ID NO: 33 - RNA, 20 nt, Artificial Sequence
  synthesized
ccccgggcucugcggucccg

SEQ ID NO: 34 - RNA, 20 nt, Artificial Sequence
  synthesized
ccgggcucugcggucccgcg

SEQ ID NO: 35 - RNA, 20 nt, Artificial Sequence
  synthesized
ggggcagggacggagcccac

SEQ ID NO: 36 - RNA, 20 nt, Artificial Sequence
  synthesized
caagaggauuggaggugucc

SEQ ID NO: 37 - RNA, 20 nt, Artificial Sequence
  synthesized
guggaaaugcugaggggcag

SEQ ID NO: 38 - RNA, 20 nt, Artificial Sequence
  synthesized
uccggccuggucagagccuc

SEQ ID NO: 39 - RNA, 20 nt, Artificial Sequence
  synthesized
aucuauauuacccaucuguc

SEQ ID NO: 40 - RNA, 20 nt, Artificial Sequence
  synthesized
ucuauauuacccaucugucc

SEQ ID NO: 41 - RNA, 20 nt, Artificial Sequence
  synthesized
gaacacucacaggcuguuua

SEQ ID NO: 42 - RNA, 20 nt, Artificial Sequence
  synthesized
cucgggcccacggcccccgg

SEQ ID NO: 43 - RNA, 20 nt, Artificial Sequence
  synthesized
ggcucgggcccacggccccc

SEQ ID NO: 44 - RNA, 20 nt, Artificial Sequence
  synthesized
gggggaccggcccugugacc

SEQ ID NO: 45 - RNA, 20 nt, Artificial Sequence
  synthesized
cuaccggagccucccagagc

SEQ ID NO: 46 - RNA, 20 nt, Artificial Sequence
  synthesized
gcuaccggagccucccagag

SEQ ID NO: 47 - RNA, 20 nt, Artificial Sequence
  synthesized
gugcuaccggagccucccag

SEQ ID NO: 48 - RNA, 20 nt, Artificial Sequence
  synthesized
accggagccucccagagcgg

SEQ ID NO: 49 - RNA, 20 nt, Artificial Sequence
  synthesized
agccucccagagcggagggu

SEQ ID NO: 50 - RNA, 20 nt, Artificial Sequence
  synthesized
cccuccgcucugggaggcuc

SEQ ID NO: 51 - RNA, 20 nt, Artificial Sequence
  synthesized
ccggagccucccagagcgga

SEQ ID NO: 52 - RNA, 20 nt, Artificial Sequence
  synthesized
ccuccgcucugggaggcucc

SEQ ID NO: 53 - RNA, 20 nt, Artificial Sequence
  synthesized
cucuuacccuccgcucuggg

SEQ ID NO: 54 - RNA, 20 nt, Artificial Sequence
  synthesized
gccucccagagcggagggua

SEQ ID NO: 55 - RNA, 20 nt, Artificial Sequence
  synthesized
uacccuccgcucugggaggc

SEQ ID NO: 56 - RNA, 20 nt, Artificial Sequence
  synthesized
uaccggagccucccagagcg

SEQ ID NO: 57 - RNA, 20 nt, Artificial Sequence
  synthesized
uccgcucugggaggcuccgg

SEQ ID NO: 58 - RNA, 20 nt, Artificial Sequence
  synthesized
gacucuuacccuccgcucug

SEQ ID NO: 59 - RNA, 20 nt, Artificial Sequence
  synthesized
ggacucuuacccuccgcucu

SEQ ID NO: 60 - RNA, 20 nt, Artificial Sequence
  synthesized
gggacucuuacccuccgcuc

SEQ ID NO: 61 - RNA, 20 nt, Artificial Sequence
  synthesized
acucuaccuggcugggcucc

SEQ ID NO: 62 - RNA, 20 nt, Artificial Sequence
  synthesized
cagcuggagcccagccaggu

SEQ ID NO: 63 - RNA, 20 nt, Artificial Sequence
  synthesized
gcuggagcccagccagguag

SEQ ID NO: 64 - RNA, 20 nt, Artificial Sequence
  synthesized
acguggaugcgguaagcugu

SEQ ID NO: 65 - RNA, 20 nt, Artificial Sequence
  synthesized
gagcucacggcgucccccac

SEQ ID NO: 66 - RNA, 20 nt, Artificial Sequence
  synthesized
guggaugcgguaagcugugg

SEQ ID NO: 67 - RNA, 20 nt, Artificial Sequence
  synthesized
gagacggggcugcugggggc

SEQ ID NO: 68 - RNA, 20 nt, Artificial Sequence
  synthesized
gcaggcagcucagguacaag

SEQ ID NO: 69 - RNA, 20 nt, Artificial Sequence
  synthesized
ggagacggggcugcuggggg

SEQ ID NO: 70 - RNA, 20 nt, Artificial Sequence
  synthesized
ucggagacggggcugcuggg

SEQ ID NO: 71 - RNA, 20 nt, Artificial Sequence
  synthesized
agggcccagacccuaaggag

SEQ ID NO: 72 - RNA, 20 nt, Artificial Sequence
  synthesized
gggcccagacccuaaggaga

SEQ ID NO: 73 - RNA, 20 nt, Artificial Sequence
  synthesized
gagcagggcccagacccuaa

SEQ ID NO: 74 - RNA, 20 nt, Artificial Sequence
  synthesized
gcagggcccagacccuaagg

SEQ ID NO: 75 - RNA, 20 nt, Artificial Sequence
  synthesized
agguaaguaggaagugagcu

SEQ ID NO: 76 - RNA, 20 nt, Artificial Sequence
  synthesized
gaaccaagcuugggcccuuc

SEQ ID NO: 77 - RNA, 20 nt, Artificial Sequence
  synthesized
ucacacagggccucgugcuc

SEQ ID NO: 78 - RNA, 20 nt, Artificial Sequence
  synthesized
ugaaccaagcuugggcccuu

SEQ ID NO: 79 - RNA, 20 nt, Artificial Sequence
  synthesized
aagcuggagaaggcgcggcc

SEQ ID NO: 80 - RNA, 20 nt, Artificial Sequence
  synthesized
acuucucaagagaacuggcc

SEQ ID NO: 81 - RNA, 20 nt, Artificial Sequence
  synthesized
gaagcuggagaaggcgcggc

SEQ ID NO: 82 - RNA, 20 nt, Artificial Sequence
  synthesized
ggaagcuggagaaggcgcgg

SEQ ID NO: 83 - RNA, 20 nt, Artificial Sequence
  synthesized
ucacuucucaagagaacugg

SEQ ID NO: 84 - RNA, 20 nt, Artificial Sequence
  synthesized
accgggcugcgugaguguga

SEQ ID NO: 85 - RNA, 20 nt, Artificial Sequence
  synthesized
guggauaccaggccaugugc

SEQ ID NO: 86 - RNA, 20 nt, Artificial Sequence
  synthesized
gcugccgcagguggcagaug

SEQ ID NO: 87 - RNA, 20 nt, Artificial Sequence
  synthesized
uggcgggccacagcugcucc

SEQ ID NO: 88 - RNA, 20 nt, Artificial Sequence
  synthesized
ccgugguugcuggaccugca

SEQ ID NO: 89 - RNA, 20 nt, Artificial Sequence
  synthesized
cgugguugcuggaccugcaa

SEQ ID NO: 90 - RNA, 20 nt, Artificial Sequence
  synthesized
agguuuaugcacuggggaug

SEQ ID NO: 91 - RNA, 20 nt, Artificial Sequence
  synthesized
uuuaugcacuggggaugaga

SEQ ID NO: 92 - RNA, 20 nt, Artificial Sequence
  synthesized
aguucaccccaccuccucaa

SEQ ID NO: 93 - RNA, 20 nt, Artificial Sequence
  synthesized
guucaccccaccuccucaaa

SEQ ID NO: 94 - RNA, 20 nt, Artificial Sequence
  synthesized
uucaccccaccuccucaaag

SEQ ID NO: 95 - RNA, 20 nt, Artificial Sequence
  synthesized
gacaucauugaccagggaua

SEQ ID NO: 96 - RNA, 20 nt, Artificial Sequence
  synthesized
gagacaucauugaccaggga

SEQ ID NO: 97 - RNA, 20 nt, Artificial Sequence
  synthesized
aaugagcucacaggcagugc

SEQ ID NO: 98 - RNA, 20 nt, Artificial Sequence
  synthesized
agugugguuggugggccagg

SEQ ID NO: 99 - RNA, 20 nt, Artificial Sequence
  synthesized
cuaaugagcucacaggcagu

SEQ ID NO: 100 - RNA, 20 nt, Artificial Sequence
  synthesized
ugugguuggugggccagggu

SEQ ID NO: 101 - RNA, 20 nt, Artificial Sequence
  synthesized
ccgggguuuaggaaccagcc

SEQ ID NO: 102 - RNA, 20 nt, Artificial Sequence
  synthesized
gaucccuuucugacuuagag

SEQ ID NO: 103 - RNA, 20 nt, Artificial Sequence
  synthesized
cguucauucaugaugauggc

SEQ ID NO: 104 - RNA, 20 nt, Artificial Sequence
  synthesized
guucauucaugaugauggca

SEQ ID NO: 105 - RNA, 20 nt, Artificial Sequence
  synthesized
cagaauagcccuggacauuc

SEQ ID NO: 106 - RNA, 20 nt, Artificial Sequence
  synthesized
gguucacucaggaguagagg

SEQ ID NO: 107 - RNA, 20 nt, Artificial Sequence
  synthesized
guucacucaggaguagagga

SEQ ID NO: 108 - RNA, 20 nt, Artificial Sequence
  synthesized
agaaggccgucuugguugcu

SEQ ID NO: 109 - RNA, 20 nt, Artificial Sequence
  synthesized
gagaaggccgucuugguugc

SEQ ID NO: 110 - RNA, 20 nt, Artificial Sequence
  synthesized
gaucagcacauagcuauccg

SEQ ID NO: 111 - RNA, 20 nt, Artificial Sequence
  synthesized
ccaccuccccgucuuguccc

SEQ ID NO: 112 - RNA, 20 nt, Artificial Sequence
  synthesized
gcgugagugugacggggaca

SEQ ID NO: 113 - RNA, 20 nt, Artificial Sequence
  synthesized
acggggacaagacggggagg

SEQ ID NO: 114 - RNA, 20 nt, Artificial Sequence
  synthesized
agugugacggggacaagacg

SEQ ID NO: 115 - RNA, 20 nt, Artificial Sequence
  synthesized
ccgucuuguccccgucacac

SEQ ID NO: 116 - RNA, 20 nt, Artificial Sequence
  synthesized
cggggacaagacggggaggu

SEQ ID NO: 117 - RNA, 20 nt, Artificial Sequence
  synthesized
gagugugacggggacaagac

SEQ ID NO: 118 - RNA, 20 nt, Artificial Sequence
  synthesized
gugacggggacaagacgggg

SEQ ID NO: 119 - RNA, 20 nt, Artificial Sequence
  synthesized
gugugacggggacaagacgg

SEQ ID NO: 120 - RNA, 20 nt, Artificial Sequence
  synthesized
ucuuguccccgucacacuca

SEQ ID NO: 121 - RNA, 20 nt, Artificial Sequence
  synthesized
ugacggggacaagacgggga

SEQ ID NO: 122 - RNA, 20 nt, Artificial Sequence
  synthesized
ugagugugacggggacaaga

SEQ ID NO: 123 - RNA, 20 nt, Artificial Sequence
  synthesized
gugucccccucccaccuccc

SEQ ID NO: 124 - RNA, 20 nt, Artificial Sequence
  synthesized
cagucaccagagaacaaugu

SEQ ID NO: 125 - RNA, 20 nt, Artificial Sequence
  synthesized
aacaaugugaaagcagaagc

SEQ ID NO: 126 - RNA, 20 nt, Artificial Sequence
  synthesized
ccagagaacaaugugaaagc

SEQ ID NO: 127 - RNA, 20 nt, Artificial Sequence
  synthesized
cugcuuucacauuguucucu

SEQ ID NO: 128 - RNA, 20 nt, Artificial Sequence
  synthesized
ucugcuuucacauuguucuc

SEQ ID NO: 129 - RNA, 20 nt, Artificial Sequence
  synthesized
ggagugggcacggcuucugc

SEQ ID NO: 130 - RNA, 20 nt, Artificial Sequence
  synthesized
gaucugauccgggagcgcac

SEQ ID NO: 131 - RNA, 20 nt, Artificial Sequence
  synthesized
ggaucugauccgggagcgca

SEQ ID NO: 132 - RNA, 20 nt, Artificial Sequence
  synthesized
acaccgcgccugaccuuugc

SEQ ID NO: 133 - RNA, 20 nt, Artificial Sequence
  synthesized
agagcccccguacauaccuu

SEQ ID NO: 134 - RNA, 20 nt, Artificial Sequence
  synthesized
caaaugguggaugaaauggu

SEQ ID NO: 135 - RNA, 20 nt, Artificial Sequence
  synthesized
uacaaaugguggaugaaaug

SEQ ID NO: 136 - RNA, 20 nt, Artificial Sequence
  synthesized
gagguuaaaacuauaugcug

SEQ ID NO: 137 - RNA, 20 nt, Artificial Sequence
  synthesized
gguuaaaacuauaugcuggg

SEQ ID NO: 138 - RNA, 20 nt, Artificial Sequence
  synthesized
uuugcuucuccuuagggucu

SEQ ID NO: 139 - RNA, 20 nt, Artificial Sequence
  synthesized
aaauaagggacaggaggucu

SEQ ID NO: 140 - RNA, 20 nt, Artificial Sequence
  synthesized
aaauaagggacgggaggucu

SEQ ID NO: 141 - RNA, 20 nt, Artificial Sequence
  synthesized
aauaagggacaggaggucug

SEQ ID NO: 142 - RNA, 20 nt, Artificial Sequence
  synthesized
aauaagggacgggaggucug

SEQ ID NO: 143 - RNA, 20 nt, Artificial Sequence
  synthesized
acgggaggucugggaaagaa

SEQ ID NO: 144 - RNA, 20 nt, Artificial Sequence
  synthesized
aggaauaaauaagggacagg

SEQ ID NO: 145 - RNA, 20 nt, Artificial Sequence
  synthesized
aggaauaaauaagggacggg

SEQ ID NO: 146 - RNA, 20 nt, Artificial Sequence
  synthesized
agggacgggaggucugggaa

SEQ ID NO: 147 - RNA, 20 nt, Artificial Sequence
  synthesized
gacaggaggucugggaaaga

SEQ ID NO: 148 - RNA, 20 nt, Artificial Sequence
  synthesized
gacgggaggucugggaaaga

SEQ ID NO: 149 - RNA, 20 nt, Artificial Sequence
  synthesized
ggaggaauaaauaagggaca

SEQ ID NO: 150 - RNA, 20 nt, Artificial Sequence
  synthesized
uaaauaagggacaggagguc

SEQ ID NO: 151 - RNA, 20 nt, Artificial Sequence
  synthesized
uaaauaagggacgggagguc

SEQ ID NO: 152 - RNA, 20 nt, Artificial Sequence
  synthesized
ucccgucccuuauuuauucc

SEQ ID NO: 153 - RNA, 20 nt, Artificial Sequence
  synthesized
uccugucccuuauuuauucc

SEQ ID NO: 154 - RNA, 20 nt, Artificial Sequence
  synthesized
cagaugucgccacuccccac

SEQ ID NO: 155 - RNA, 20 nt, Artificial Sequence
  synthesized
cagaugucgccacucccuac

SEQ ID NO: 156 - RNA, 20 nt, Artificial Sequence
  synthesized
ccacagacuccgagacacca

SEQ ID NO: 157 - RNA, 20 nt, Artificial Sequence
  synthesized
cuacagacuccgagacacca

SEQ ID NO: 158 - RNA, 20 nt, Artificial Sequence
  synthesized
cuguagggaguggcgacauc

SEQ ID NO: 159 - RNA, 20 nt, Artificial Sequence
  synthesized
cuguggggaguggcgacauc

SEQ ID NO: 160 - RNA, 20 nt, Artificial Sequence
  synthesized
gccacuccccacagacuccg

SEQ ID NO: 161 - RNA, 20 nt, Artificial Sequence
  synthesized
gccacucccuacagacuccg

SEQ ID NO: 162 - RNA, 20 nt, Artificial Sequence
  synthesized
gucucggagucuguagggag

SEQ ID NO: 163 - RNA, 20 nt, Artificial Sequence
  synthesized
gucucggagucuguggggag

SEQ ID NO: 164 - RNA, 20 nt, Artificial Sequence
  synthesized
gugucucggagucuguaggg

SEQ ID NO: 165 - RNA, 20 nt, Artificial Sequence
  synthesized
gugucucggagucugugggg

SEQ ID NO: 166 - RNA, 20 nt, Artificial Sequence
  synthesized
uccccacagacuccgagaca

SEQ ID NO: 167 - RNA, 20 nt, Artificial Sequence
  synthesized
ucccuacagacuccgagaca

SEQ ID NO: 168 - RNA, 20 nt, Artificial Sequence
  synthesized
ucgccacuccccacagacuc

SEQ ID NO: 169 - RNA, 20 nt, Artificial Sequence
  synthesized
ucgccacucccuacagacuc

SEQ ID NO: 170 - RNA, 20 nt, Artificial Sequence
  synthesized
ucggagucuguagggagugg

SEQ ID NO: 171 - RNA, 20 nt, Artificial Sequence
  synthesized
ucggagucuguggggagugg

SEQ ID NO: 172 - RNA, 20 nt, Artificial Sequence
  synthesized
ucucggagucuguagggagu

SEQ ID NO: 173 - RNA, 20 nt, Artificial Sequence
  synthesized
ucucggagucuguggggagu

SEQ ID NO: 174 - RNA, 20 nt, Artificial Sequence
  synthesized
ucuguagggaguggcgacau

SEQ ID NO: 175 - RNA, 20 nt, Artificial Sequence
  synthesized
ucuguggggaguggcgacau

SEQ ID NO: 176 - RNA, 20 nt, Artificial Sequence
  synthesized
uggugucucggagucuguag

SEQ ID NO: 177 - RNA, 20 nt, Artificial Sequence
  synthesized
uggugucucggagucugugg

SEQ ID NO: 178 - RNA, 20 nt, Artificial Sequence
  synthesized
uguagggaguggcgacaucu

SEQ ID NO: 179 - RNA, 20 nt, Artificial Sequence
  synthesized
uguggggaguggcgacaucu

SEQ ID NO: 180 - RNA, 20 nt, Artificial Sequence
  synthesized
uuggugucucggagucugua

SEQ ID NO: 181 - RNA, 20 nt, Artificial Sequence
  synthesized
uuggugucucggagucugug

SEQ ID NO: 182 - RNA, 20 nt, Artificial Sequence
  synthesized
caguagcugggacuacaggc

SEQ ID NO: 183 - RNA, 20 nt, Artificial Sequence
  synthesized
cccacaguagcugggacuac

SEQ ID NO: 184 - RNA, 20 nt, Artificial Sequence
  synthesized
cugggacuacagacgcccgc

SEQ ID NO: 185 - RNA, 20 nt, Artificial Sequence
  synthesized
gucuguagucccagcuacug

SEQ ID NO: 186 - RNA, 20 nt, Artificial Sequence
  synthesized
aaauaaugccggaacauugc

SEQ ID NO: 187 - RNA, 20 nt, Artificial Sequence
  synthesized
aaauaaugcuggaacauugc

SEQ ID NO: 188 - RNA, 20 nt, Artificial Sequence
  synthesized
auaaugccggaacauugccg

SEQ ID NO: 189 - RNA, 20 nt, Artificial Sequence
  synthesized
auaaugcuggaacauugccg

SEQ ID NO: 190 - RNA, 20 nt, Artificial Sequence
  synthesized
ggcaauguuccagcauuauu

SEQ ID NO: 191 - RNA, 20 nt, Artificial Sequence
  synthesized
ggcaauguuccggcauuauu

SEQ ID NO: 192 - RNA, 20 nt, Artificial Sequence
  synthesized
uccggcauuauuucaaaucu

SEQ ID NO: 193 - RNA, 20 nt, Artificial Sequence
  synthesized
uguuccggcauuauuucaaa

SEQ ID NO: 194 - RNA, 20 nt, Artificial Sequence
  synthesized
aauuacuagcugagaucaac

SEQ ID NO: 195 - RNA, 20 nt, Artificial Sequence
  synthesized
agcugagaacaacugaccuc

SEQ ID NO: 196 - RNA, 20 nt, Artificial Sequence
  synthesized
agcugagaucaacugaccuc

SEQ ID NO: 197 - RNA, 20 nt, Artificial Sequence
  synthesized
aguugaucucagcuaguaau

SEQ ID NO: 198 - RNA, 20 nt, Artificial Sequence
  synthesized
aguuguucucagcuaguaau

SEQ ID NO: 199 - RNA, 20 nt, Artificial Sequence
  synthesized
aucucagcuaguaauugaca

SEQ ID NO: 200 - RNA, 20 nt, Artificial Sequence
  synthesized
ccagaggucaguugaucuca

SEQ ID NO: 201 - RNA, 20 nt, Artificial Sequence
  synthesized
ccagaggucaguuguucuca

SEQ ID NO: 202 - RNA, 20 nt, Artificial Sequence
  synthesized
cugagaucaacugaccucug

SEQ ID NO: 203 - RNA, 20 nt, Artificial Sequence
  synthesized
gaucucagcuaguaauugac

SEQ ID NO: 204 - RNA, 20 nt, Artificial Sequence
  synthesized
gcugagaacaacugaccucu

SEQ ID NO: 205 - RNA, 20 nt, Artificial Sequence
  synthesized
gcugagaucaacugaccucu

SEQ ID NO: 206 - RNA, 20 nt, Artificial Sequence
  synthesized
guucucagcuaguaauugac

SEQ ID NO: 207 - RNA, 20 nt, Artificial Sequence
  synthesized
ucaauuacuagcugagauca

SEQ ID NO: 208 - RNA, 20 nt, Artificial Sequence
  synthesized
ucaguugaucucagcuagua

SEQ ID NO: 209 - RNA, 20 nt, Artificial Sequence
  synthesized
ugaucucagcuaguaauuga

SEQ ID NO: 210 - RNA, 20 nt, Artificial Sequence
  synthesized
uguucucagcuaguaauuga

SEQ ID NO: 211 - RNA, 20 nt, Artificial Sequence
  synthesized
uucucagcuaguaauugaca

SEQ ID NO: 212 - RNA, 20 nt, Artificial Sequence
  synthesized
ucaaaaaaucuuggugucuc

SEQ ID NO: 213 - RNA, 20 nt, Artificial Sequence
  synthesized
ucagaaaaucuuggugucuc

SEQ ID NO: 214 - RNA, 20 nt, Artificial Sequence
  synthesized
uucagaaaaucuuggugucu

SEQ ID NO: 215 - RNA, 20 nt, Artificial Sequence
  synthesized
ccaguuccuucccaccuuca

SEQ ID NO: 216 - RNA, 20 nt, Artificial Sequence
  synthesized
ccgguuccuucccaccuuca

SEQ ID NO: 217 - RNA, 20 nt, Artificial Sequence
  synthesized
gagugaaggugggaaggaac

SEQ ID NO: 218 - RNA, 20 nt, Artificial Sequence
  synthesized
gcagggcugagccaguuccu

SEQ ID NO: 219 - RNA, 20 nt, Artificial Sequence
  synthesized
gcagggcugagccgguuccu

SEQ ID NO: 220 - RNA, 20 nt, Artificial Sequence
  synthesized
ugaaggugggaaggaaccgg

SEQ ID NO: 221 - RNA, 20 nt, Artificial Sequence
  synthesized
ugaaggugggaaggaacugg

SEQ ID NO: 222 - RNA, 20 nt, Artificial Sequence
  synthesized
uggagugggcagggcugagc

SEQ ID NO: 223 - RNA, 20 nt, Artificial Sequence
  synthesized
aacugacccucaagcagucc

SEQ ID NO: 224 - RNA, 20 nt, Artificial Sequence
  synthesized
aacugacccucgagcagucc

SEQ ID NO: 225 - RNA, 20 nt, Artificial Sequence
  synthesized
aucauguauauaacugaccc

SEQ ID NO: 226 - RNA, 20 nt, Artificial Sequence
  synthesized
auguauauaacugacccuca

SEQ ID NO: 227 - RNA, 20 nt, Artificial Sequence
  synthesized
auguauauaacugacccucg

SEQ ID NO: 228 - RNA, 20 nt, Artificial Sequence
  synthesized
ucgagggucaguuauauaca

SEQ ID NO: 229 - RNA, 20 nt, Artificial Sequence
  synthesized
ugacccucaagcaguccaga

SEQ ID NO: 230 - RNA, 20 nt, Artificial Sequence
  synthesized
ugacccucgagcaguccaga

SEQ ID NO: 231 - RNA, 20 nt, Artificial Sequence
  synthesized
aacacggaggagagggcggg

SEQ ID NO: 232 - RNA, 20 nt, Artificial Sequence
  synthesized
aacacggcggagagggcggg

SEQ ID NO: 233 - RNA, 20 nt, Artificial Sequence
  synthesized
acccccaccgugaacacgga

SEQ ID NO: 234 - RNA, 20 nt, Artificial Sequence
  synthesized
acccccaccgugaacacggc

SEQ ID NO: 235 - RNA, 20 nt, Artificial Sequence
  synthesized
accgugaacacggaggagag

SEQ ID NO: 236 - RNA, 20 nt, Artificial Sequence
  synthesized
accgugaacacggcggagag

SEQ ID NO: 237 - RNA, 20 nt, Artificial Sequence
  synthesized
caccgugaacacggaggaga

SEQ ID NO: 238 - RNA, 20 nt, Artificial Sequence
  synthesized
caccgugaacacggcggaga

SEQ ID NO: 239 - RNA, 20 nt, Artificial Sequence
  synthesized
cagccccccgcccucuccgc

SEQ ID NO: 240 - RNA, 20 nt, Artificial Sequence
  synthesized
cagccccccgcccucuccuc

SEQ ID NO: 241 - RNA, 20 nt, Artificial Sequence
  synthesized
ccaccgugaacacggaggag

SEQ ID NO: 242 - RNA, 20 nt, Artificial Sequence
  synthesized
ccaccgugaacacggcggag

SEQ ID NO: 243 - RNA, 20 nt, Artificial Sequence
  synthesized
ccccaccgugaacacggagg

SEQ ID NO: 244 - RNA, 20 nt, Artificial Sequence
  synthesized
ccccaccgugaacacggcgg

SEQ ID NO: 245 - RNA, 20 nt, Artificial Sequence
  synthesized
ccucuccgccguguucacgg

SEQ ID NO: 246 - RNA, 20 nt, Artificial Sequence
  synthesized
ccucuccuccguguucacgg

SEQ ID NO: 247 - RNA, 20 nt, Artificial Sequence
  synthesized
cgcccucuccgccguguuca

SEQ ID NO: 248 - RNA, 20 nt, Artificial Sequence
  synthesized
cgcccucuccuccguguuca

SEQ ID NO: 249 - RNA, 20 nt, Artificial Sequence
  synthesized
cgugaacacggaggagaggg

SEQ ID NO: 250 - RNA, 20 nt, Artificial Sequence
  synthesized
cgugaacacggcggagaggg

SEQ ID NO: 251 - RNA, 20 nt, Artificial Sequence
  synthesized
cuccgccguguucacggugg

SEQ ID NO: 252 - RNA, 20 nt, Artificial Sequence
  synthesized
cuccuccguguucacggugg

SEQ ID NO: 253 - RNA, 20 nt, Artificial Sequence
  synthesized
cucuccgccguguucacggu

SEQ ID NO: 254 - RNA, 20 nt, Artificial Sequence
  synthesized
cucuccuccguguucacggu

SEQ ID NO: 255 - RNA, 20 nt, Artificial Sequence
  synthesized
gaacacggaggagagggcgg

SEQ ID NO: 256 - RNA, 20 nt, Artificial Sequence
  synthesized
gaacacggcggagagggcgg

SEQ ID NO: 257 - RNA, 20 nt, Artificial Sequence
  synthesized
gcccucuccgccguguucac

SEQ ID NO: 258 - RNA, 20 nt, Artificial Sequence
  synthesized
gcccucuccuccguguucac

SEQ ID NO: 259 - RNA, 20 nt, Artificial Sequence
  synthesized
gugaacacggaggagagggc

SEQ ID NO: 260 - RNA, 20 nt, Artificial Sequence
  synthesized
gugaacacggcggagagggc

SEQ ID NO: 261 - RNA, 20 nt, Artificial Sequence
  synthesized
ucuccgccguguucacggug

SEQ ID NO: 262 - RNA, 20 nt, Artificial Sequence
  synthesized
ucuccuccguguucacggug

SEQ ID NO: 263 - RNA, 20 nt, Artificial Sequence
  synthesized
ugaacacggaggagagggcg

SEQ ID NO: 264 - RNA, 20 nt, Artificial Sequence
  synthesized
ugaacacggcggagagggcg

SEQ ID NO: 265 - RNA, 20 nt, Artificial Sequence
  synthesized
agggggcagcagucaccaga

SEQ ID NO: 266 - RNA, 20 nt, Artificial Sequence
  synthesized
cagcagucaccagagaacaa

SEQ ID NO: 267 - RNA, 20 nt, Artificial Sequence
  synthesized
cagucaccagaggacaaugu

SEQ ID NO: 268 - RNA, 20 nt, Artificial Sequence
  synthesized
ccagaggacaaugugaaagc

SEQ ID NO: 269 - RNA, 20 nt, Artificial Sequence
  synthesized
cugcuuucacauuguccucu

SEQ ID NO: 270 - RNA, 20 nt, Artificial Sequence
  synthesized
gacaaugugaaagcagaagc

SEQ ID NO: 271 - RNA, 20 nt, Artificial Sequence
  synthesized
gcagucaccagagaacaaug

SEQ ID NO: 272 - RNA, 20 nt, Artificial Sequence
  synthesized
gcagucaccagaggacaaug

SEQ ID NO: 273 - RNA, 20 nt, Artificial Sequence
  synthesized
ucugcuuucacauuguccuc

SEQ ID NO: 274 - RNA, 20 nt, Artificial Sequence
  synthesized
aagguccagaagagcccgag

SEQ ID NO: 275 - RNA, 20 nt, Artificial Sequence
  synthesized
aagguccagaagagcccggg

SEQ ID NO: 276 - RNA, 20 nt, Artificial Sequence
  synthesized
caagguccagaagagcccga

SEQ ID NO: 277 - RNA, 20 nt, Artificial Sequence
  synthesized
caagguccagaagagcccgg

SEQ ID NO: 278 - RNA, 20 nt, Artificial Sequence
  synthesized
cuguguuccccgggcucuuc

SEQ ID NO: 279 - RNA, 20 nt, Artificial Sequence
  synthesized
cuguguuccucgggcucuuc

SEQ ID NO: 280 - RNA, 20 nt, Artificial Sequence
  synthesized
gaagagcccgaggaacacag

SEQ ID NO: 281 - RNA, 20 nt, Artificial Sequence
  synthesized
gaagagcccggggaacacag

SEQ ID NO: 282 - RNA, 20 nt, Artificial Sequence
  synthesized
gcaagguccagaagagcccg

SEQ ID NO: 283 - RNA, 20 nt, Artificial Sequence
  synthesized
gcuguguuccccgggcucuu

SEQ ID NO: 284 - RNA, 20 nt, Artificial Sequence
  synthesized
gcuguguuccucgggcucuu

SEQ ID NO: 285 - RNA, 20 nt, Artificial Sequence
  synthesized
guccagaagagcccgaggaa

SEQ ID NO: 286 - RNA, 20 nt, Artificial Sequence
  synthesized
guccagaagagcccggggaa

SEQ ID NO: 287 - RNA, 20 nt, Artificial Sequence
  synthesized
uccccgggcucuucuggacc

SEQ ID NO: 288 - RNA, 20 nt, Artificial Sequence
  synthesized
ugcaagguccagaagagccc

SEQ ID NO: 289 - RNA, 20 nt, Artificial Sequence
  synthesized
uguguuccccgggcucuucu

SEQ ID NO: 290 - RNA, 20 nt, Artificial Sequence
  synthesized
uguguuccucgggcucuucu

SEQ ID NO: 291 - RNA, 20 nt, Artificial Sequence
  synthesized
accugucgaguguauccacc

SEQ ID NO: 292 - RNA, 20 nt, Artificial Sequence
  synthesized
accugucgaguguauccucc

SEQ ID NO: 293 - RNA, 20 nt, Artificial Sequence
  synthesized
aucaggaggauacacucgac

SEQ ID NO: 294 - RNA, 20 nt, Artificial Sequence
  synthesized
aucagguggauacacucgac

SEQ ID NO: 295 - RNA, 20 nt, Artificial Sequence
  synthesized
auccuccugaugaagcagug

SEQ ID NO: 296 - RNA, 20 nt, Artificial Sequence
  synthesized
ccaccugaugaagcagugcu

SEQ ID NO: 297 - RNA, 20 nt, Artificial Sequence
  synthesized
ccagcacugcuucaucagga

SEQ ID NO: 298 - RNA, 20 nt, Artificial Sequence
  synthesized
cccagcacugcuucaucagg

SEQ ID NO: 299 - RNA, 20 nt, Artificial Sequence
  synthesized
cuucaucaggaggauacacu

SEQ ID NO: 300 - RNA, 20 nt, Artificial Sequence
  synthesized
cuucaucagguggauacacu

SEQ ID NO: 301 - RNA, 20 nt, Artificial Sequence
  synthesized
gaggauacacucgacaggug

SEQ ID NO: 302 - RNA, 20 nt, Artificial Sequence
  synthesized
gcccagcacugcuucaucag

SEQ ID NO: 303 - RNA, 20 nt, Artificial Sequence
  synthesized
guggauacacucgacaggug

SEQ ID NO: 304 - RNA, 20 nt, Artificial Sequence
  synthesized
guguauccaccugaugaagc

SEQ ID NO: 305 - RNA, 20 nt, Artificial Sequence
  synthesized
ucaggaggauacacucgaca

SEQ ID NO: 306 - RNA, 20 nt, Artificial Sequence
  synthesized
ucagguggauacacucgaca

SEQ ID NO: 307 - RNA, 20 nt, Artificial Sequence
  synthesized
uccuccugaugaagcagugc

SEQ ID NO: 308 - RNA, 20 nt, Artificial Sequence
  synthesized
ugcccagcacugcuucauca

SEQ ID NO: 309 - RNA, 20 nt, Artificial Sequence
  synthesized
ugcuucaucaggaggauaca

SEQ ID NO: 310 - RNA, 20 nt, Artificial Sequence
  synthesized
ugcuucaucagguggauaca

SEQ ID NO: 311 - RNA, 20 nt, Artificial Sequence
  synthesized
ugucgaguguauccaccuga

SEQ ID NO: 312 - RNA, 20 nt, Artificial Sequence
  synthesized
ugucgaguguauccuccuga

SEQ ID NO: 313 - RNA, 20 nt, Artificial Sequence
  synthesized
acguucugcaggcagcagag

SEQ ID NO: 314 - RNA, 20 nt, Artificial Sequence
  synthesized
agaacgccccacccaagcca

SEQ ID NO: 315 - RNA, 20 nt, Artificial Sequence
  synthesized
agaacgucccacccaagcca

SEQ ID NO: 316 - RNA, 20 nt, Artificial Sequence
  synthesized
cagaacgccccacccaagcc

SEQ ID NO: 317 - RNA, 20 nt, Artificial Sequence
  synthesized
cagaacgucccacccaagcc

SEQ ID NO: 318 - RNA, 20 nt, Artificial Sequence
  synthesized
cugccugcagaacgccccac

SEQ ID NO: 319 - RNA, 20 nt, Artificial Sequence
  synthesized
cugccugcagaacgucccac

SEQ ID NO: 320 - RNA, 20 nt, Artificial Sequence
  synthesized
cuugggugggacguucugca

SEQ ID NO: 321 - RNA, 20 nt, Artificial Sequence
  synthesized
gacguucugcaggcagcaga

SEQ ID NO: 322 - RNA, 20 nt, Artificial Sequence
  synthesized
gccccacccaagccaggugu

SEQ ID NO: 323 - RNA, 20 nt, Artificial Sequence
  synthesized
gcguucugcaggcagcagag

SEQ ID NO: 324 - RNA, 20 nt, Artificial Sequence
  synthesized
gcuugggugggacguucugc

SEQ ID NO: 325 - RNA, 20 nt, Artificial Sequence
  synthesized
gcuuggguggggcguucugc

SEQ ID NO: 326 - RNA, 20 nt, Artificial Sequence
  synthesized
gggcguucugcaggcagcag

SEQ ID NO: 327 - RNA, 20 nt, Artificial Sequence
  synthesized
gucccacccaagccaggugu

SEQ ID NO: 328 - RNA, 20 nt, Artificial Sequence
  synthesized
ucgggacaccuggcuugggu

SEQ ID NO: 329 - RNA, 20 nt, Artificial Sequence
  synthesized
uggcuugggugggacguucu

SEQ ID NO: 330 - RNA, 20 nt, Artificial Sequence
  synthesized
uggcuuggguggggcguucu

SEQ ID NO: 331 - RNA, 20 nt, Artificial Sequence
  synthesized
ugggacguucugcaggcagc

SEQ ID NO: 332 - RNA, 20 nt, Artificial Sequence
  synthesized
uggggcguucugcaggcagc

SEQ ID NO: 333 - RNA, 20 nt, Artificial Sequence
  synthesized
aguucccugauuauacccac

SEQ ID NO: 334 - RNA, 20 nt, Artificial Sequence
  synthesized
aguucccugauuaugcccac

SEQ ID NO: 335 - RNA, 20 nt, Artificial Sequence
  synthesized
cugauuauacccacaggaga

SEQ ID NO: 336 - RNA, 20 nt, Artificial Sequence
  synthesized
cugauuaugcccacaggaga

SEQ ID NO: 337 - RNA, 20 nt, Artificial Sequence
  synthesized
cuucuccugugggcauaauc

SEQ ID NO: 338 - RNA, 20 nt, Artificial Sequence
  synthesized
cuucuccuguggguauaauc

SEQ ID NO: 339 - RNA, 20 nt, Artificial Sequence
  synthesized
guucccugauuauacccaca

SEQ ID NO: 340 - RNA, 20 nt, Artificial Sequence
  synthesized
guucccugauuaugcccaca

SEQ ID NO: 341 - RNA, 20 nt, Artificial Sequence
  synthesized
ucccugauuauacccacagg

SEQ ID NO: 342 - RNA, 20 nt, Artificial Sequence
  synthesized
ucccugauuaugcccacagg

SEQ ID NO: 343 - RNA, 20 nt, Artificial Sequence
  synthesized
ucuccugugggcauaaucag

SEQ ID NO: 344 - RNA, 20 nt, Artificial Sequence
  synthesized
ucuccuguggguauaaucag

SEQ ID NO: 345 - RNA, 20 nt, Artificial Sequence
  synthesized
uucuccugugggcauaauca

SEQ ID NO: 346 - RNA, 20 nt, Artificial Sequence
  synthesized
uucuccuguggguauaauca

SEQ ID NO: 347 - RNA, 20 nt, Artificial Sequence
  synthesized
aagaaucuaggggcaucgau

SEQ ID NO: 348 - RNA, 20 nt, Artificial Sequence
  synthesized
aagaaucuaggggcauugau

SEQ ID NO: 349 - RNA, 20 nt, Artificial Sequence
  synthesized
aaugccccuagauucuucca

SEQ ID NO: 350 - RNA, 20 nt, Artificial Sequence
  synthesized
aauuucccaucaaugccccu

SEQ ID NO: 351 - RNA, 20 nt, Artificial Sequence
  synthesized
aauuucccaucgaugccccu

SEQ ID NO: 352 - RNA, 20 nt, Artificial Sequence
  synthesized
agaaucuaggggcaucgaug

SEQ ID NO: 353 - RNA, 20 nt, Artificial Sequence
  synthesized
agaaucuaggggcauugaug

SEQ ID NO: 354 - RNA, 20 nt, Artificial Sequence
  synthesized
cgaugggaaauugcaacccc

SEQ ID NO: 355 - RNA, 20 nt, Artificial Sequence
  synthesized
gaagaaucuaggggcaucga

SEQ ID NO: 356 - RNA, 20 nt, Artificial Sequence
  synthesized
gaagaaucuaggggcauuga

SEQ ID NO: 357 - RNA, 20 nt, Artificial Sequence
  synthesized
gaugccccuagauucuucca

SEQ ID NO: 358 - RNA, 20 nt, Artificial Sequence
  synthesized
uaggggcaucgaugggaaau

SEQ ID NO: 359 - RNA, 20 nt, Artificial Sequence
  synthesized
ugaugggaaauugcaacccc

SEQ ID NO: 360 - RNA, 20 nt, Artificial Sequence
  synthesized
ugcaauuucccaucgaugcc

SEQ ID NO: 361 - RNA, 20 nt, Artificial Sequence
  synthesized
agcaggggauuugaggguca

SEQ ID NO: 362 - RNA, 20 nt, Artificial Sequence
  synthesized
caaauccccugcuggacuca

SEQ ID NO: 363 - RNA, 20 nt, Artificial Sequence
  synthesized
cacauccccugcuggacuca

SEQ ID NO: 364 - RNA, 20 nt, Artificial Sequence
  synthesized
cagcaggggauuugaggguc

SEQ ID NO: 365 - RNA, 20 nt, Artificial Sequence
  synthesized
ccagcaggggaugugagggu

SEQ ID NO: 366 - RNA, 20 nt, Artificial Sequence
  synthesized
ccagcaggggauuugagggu

SEQ ID NO: 367 - RNA, 20 nt, Artificial Sequence
  synthesized
ccugaguccagcaggggauu

SEQ ID NO: 368 - RNA, 20 nt, Artificial Sequence
  synthesized
cugacccucaaauccccugc

SEQ ID NO: 369 - RNA, 20 nt, Artificial Sequence
  synthesized
cugacccucacauccccugc

SEQ ID NO: 370 - RNA, 20 nt, Artificial Sequence
  synthesized
cugaguccagcaggggaugu

SEQ ID NO: 371 - RNA, 20 nt, Artificial Sequence
  synthesized
cugaguccagcaggggauuu

SEQ ID NO: 372 - RNA, 20 nt, Artificial Sequence
  synthesized
gaguccagcaggggauguga

SEQ ID NO: 373 - RNA, 20 nt, Artificial Sequence
  synthesized
gaguccagcaggggauuuga

SEQ ID NO: 374 - RNA, 20 nt, Artificial Sequence
  synthesized
gcaggggauuugagggucag

SEQ ID NO: 375 - RNA, 20 nt, Artificial Sequence
  synthesized
ucaaauccccugcuggacuc

SEQ ID NO: 376 - RNA, 20 nt, Artificial Sequence
  synthesized
ugacccucaaauccccugcu

SEQ ID NO: 377 - RNA, 20 nt, Artificial Sequence
  synthesized
ugacccucacauccccugcu

SEQ ID NO: 378 - RNA, 20 nt, Artificial Sequence
  synthesized
ugaguccagcaggggaugug

SEQ ID NO: 379 - RNA, 20 nt, Artificial Sequence
  synthesized
ugaguccagcaggggauuug

SEQ ID NO: 380 - RNA, 20 nt, Artificial Sequence
  synthesized
caucuggagcccagccaggu

SEQ ID NO: 381 - RNA, 20 nt, Artificial Sequence
  synthesized
ggagggcaucuggagcccag

SEQ ID NO: 382 - RNA, 20 nt, Artificial Sequence
  synthesized
ggcugggagggcaucuggag

SEQ ID NO: 383 - RNA, 20 nt, Artificial Sequence
  synthesized
ggcugggcuccagaugcccu

SEQ ID NO: 384 - RNA, 20 nt, Artificial Sequence
  synthesized
gggugggcugggagggcauc

SEQ ID NO: 385 - RNA, 20 nt, Artificial Sequence
  synthesized
ggugggcugggagggcaucu

SEQ ID NO: 386 - RNA, 20 nt, Artificial Sequence
  synthesized
ucuggagcccagccagguag

SEQ ID NO: 387 - RNA, 20 nt, Artificial Sequence
  synthesized
accggagccucccagagcag

SEQ ID NO: 388 - RNA, 20 nt, Artificial Sequence
  synthesized
agcagaggguaagagucccc

SEQ ID NO: 389 - RNA, 20 nt, Artificial Sequence
  synthesized
agccucccagagcagagggu

SEQ ID NO: 390 - RNA, 20 nt, Artificial Sequence
  synthesized
agcggaggguaagagucccc

SEQ ID NO: 391 - RNA, 20 nt, Artificial Sequence
  synthesized
cccucugcucugggaggcuc

SEQ ID NO: 392 - RNA, 20 nt, Artificial Sequence
  synthesized
ccucugcucugggaggcucc

SEQ ID NO: 393 - RNA, 20 nt, Artificial Sequence
  synthesized
cucuuacccucugcucuggg

SEQ ID NO: 394 - RNA, 20 nt, Artificial Sequence
  synthesized
gacucuuacccucugcucug

SEQ ID NO: 395 - RNA, 20 nt, Artificial Sequence
  synthesized
gccucccagagcagagggua

SEQ ID NO: 396 - RNA, 20 nt, Artificial Sequence
  synthesized
ggacucuuacccucugcucu

SEQ ID NO: 397 - RNA, 20 nt, Artificial Sequence
  synthesized
gggacucuuacccucugcuc

SEQ ID NO: 398 - RNA, 20 nt, Artificial Sequence
  synthesized
uaccggagccucccagagca

SEQ ID NO: 399 - RNA, 20 nt, Artificial Sequence
  synthesized
ucugcucugggaggcuccgg

SEQ ID NO: 400 - RNA, 20 nt, Artificial Sequence
  synthesized
agcagcaccgaaugcaucac

SEQ ID NO: 401 - RNA, 20 nt, Artificial Sequence
  synthesized
agcagcaccgagugcaucac

SEQ ID NO: 402 - RNA, 20 nt, Artificial Sequence
  synthesized
agugaucauggugaugcacu

SEQ ID NO: 403 - RNA, 20 nt, Artificial Sequence
  synthesized
agugaucauggugaugcauu

SEQ ID NO: 404 - RNA, 20 nt, Artificial Sequence
  synthesized
augcacucggugcugcuggg

SEQ ID NO: 405 - RNA, 20 nt, Artificial Sequence
  synthesized
augcauucggugcugcuggg

SEQ ID NO: 406 - RNA, 20 nt, Artificial Sequence
  synthesized
cacucggugcugcugggugg

SEQ ID NO: 407 - RNA, 20 nt, Artificial Sequence
  synthesized
cagcaccgaaugcaucacca

SEQ ID NO: 408 - RNA, 20 nt, Artificial Sequence
  synthesized
cagcaccgagugcaucacca

SEQ ID NO: 409 - RNA, 20 nt, Artificial Sequence
  synthesized
cauucggugcugcugggugg

SEQ ID NO: 410 - RNA, 20 nt, Artificial Sequence
  synthesized
ccacccagcagcaccgaaug

SEQ ID NO: 411 - RNA, 20 nt, Artificial Sequence
  synthesized
ccacccagcagcaccgagug

SEQ ID NO: 412 - RNA, 20 nt, Artificial Sequence
  synthesized
cucggugcugcuggguggcg

SEQ ID NO: 413 - RNA, 20 nt, Artificial Sequence
  synthesized
ggugaugcacucggugcugc

SEQ ID NO: 414 - RNA, 20 nt, Artificial Sequence
  synthesized
ggugaugcauucggugcugc

SEQ ID NO: 415 - RNA, 20 nt, Artificial Sequence
  synthesized
gugaucauggugaugcacuc

SEQ ID NO: 416 - RNA, 20 nt, Artificial Sequence
  synthesized
gugaucauggugaugcauuc

SEQ ID NO: 417 - RNA, 20 nt, Artificial Sequence
  synthesized
gugaugcacucggugcugcu

SEQ ID NO: 418 - RNA, 20 nt, Artificial Sequence
  synthesized
gugaugcauucggugcugcu

SEQ ID NO: 419 - RNA, 20 nt, Artificial Sequence
  synthesized
ugaugcacucggugcugcug

SEQ ID NO: 420 - RNA, 20 nt, Artificial Sequence
  synthesized
ugaugcauucggugcugcug

SEQ ID NO: 421 - RNA, 20 nt, Artificial Sequence
  synthesized
ugcacucggugcugcugggu

SEQ ID NO: 422 - RNA, 20 nt, Artificial Sequence
  synthesized
ugcauucggugcugcugggu

SEQ ID NO: 423 - RNA, 20 nt, Artificial Sequence
  synthesized
uucggugcugcuggguggcg

SEQ ID NO: 424 - RNA, 20 nt, Artificial Sequence
  synthesized
aaacaccugguauuaaaagg

SEQ ID NO: 425 - RNA, 20 nt, Artificial Sequence
  synthesized
aaacaccugguauuaaaugg

SEQ ID NO: 426 - RNA, 20 nt, Artificial Sequence
  synthesized
accugguauuaaaaggugau

SEQ ID NO: 427 - RNA, 20 nt, Artificial Sequence
  synthesized
accugguauuaaauggugau

SEQ ID NO: 428 - RNA, 20 nt, Artificial Sequence
  synthesized
aggugaucgaguucauuaau

SEQ ID NO: 429 - RNA, 20 nt, Artificial Sequence
  synthesized
auuaaaaggugaucgaguuc

SEQ ID NO: 430 - RNA, 20 nt, Artificial Sequence
  synthesized
auuaaauggugaucgaguuc

SEQ ID NO: 431 - RNA, 20 nt, Artificial Sequence
  synthesized
auuaaugaacucgaucacca

SEQ ID NO: 432 - RNA, 20 nt, Artificial Sequence
  synthesized
auuaaugaacucgaucaccu

SEQ ID NO: 433 - RNA, 20 nt, Artificial Sequence
  synthesized
cucgaucaccauuuaauacc

SEQ ID NO: 434 - RNA, 20 nt, Artificial Sequence
  synthesized
ucgaucaccauuuaauacca

SEQ ID NO: 435 - RNA, 20 nt, Artificial Sequence
  synthesized
uggugaucgaguucauuaau

SEQ ID NO: 436 - RNA, 20 nt, Artificial Sequence
  synthesized
ugggugacaaagugagacuc

SEQ ID NO: 437 - RNA, 20 nt, Artificial Sequence
  synthesized
acgcgggaccgcagagcccg

SEQ ID NO: 438 - RNA, 20 nt, Artificial Sequence
  synthesized
agcccaccacgcgggaccgc

SEQ ID NO: 439 - RNA, 20 nt, Artificial Sequence
  synthesized
agcccaccgcgcgggaccgc

SEQ ID NO: 440 - RNA, 20 nt, Artificial Sequence
  synthesized
agggacggagcccaccacgc

SEQ ID NO: 441 - RNA, 20 nt, Artificial Sequence
  synthesized
agggacggagcccaccgcgc

SEQ ID NO: 442 - RNA, 20 nt, Artificial Sequence
  synthesized
cacgcgggaccgcagagccc

SEQ ID NO: 443 - RNA, 20 nt, Artificial Sequence
  synthesized
cagggacggagcccaccacg

SEQ ID NO: 444 - RNA, 20 nt, Artificial Sequence
  synthesized
cagggacggagcccaccgcg

SEQ ID NO: 445 - RNA, 20 nt, Artificial Sequence
  synthesized
ccacgcgggaccgcagagcc

SEQ ID NO: 446 - RNA, 20 nt, Artificial Sequence
  synthesized
ccgcgcgggaccgcagagcc

SEQ ID NO: 447 - RNA, 20 nt, Artificial Sequence
  synthesized
cgcgcgggaccgcagagccc

SEQ ID NO: 448 - RNA, 20 nt, Artificial Sequence
  synthesized
cgcggugggcuccgucccug

SEQ ID NO: 449 - RNA, 20 nt, Artificial Sequence
  synthesized
cgggcucugcggucccgcgc

SEQ ID NO: 450 - RNA, 20 nt, Artificial Sequence
  synthesized
cgggcucugcggucccgcgu

SEQ ID NO: 451 - RNA, 20 nt, Artificial Sequence
  synthesized
cguggugggcuccgucccug

SEQ ID NO: 452 - RNA, 20 nt, Artificial Sequence
  synthesized
cugcggucccgcgcgguggg

SEQ ID NO: 453 - RNA, 20 nt, Artificial Sequence
  synthesized
cugcggucccgcgugguggg

SEQ ID NO: 454 - RNA, 20 nt, Artificial Sequence
  synthesized
gagcccaccacgcgggaccg

SEQ ID NO: 455 - RNA, 20 nt, Artificial Sequence
  synthesized
gagcccaccgcgcgggaccg

SEQ ID NO: 456 - RNA, 20 nt, Artificial Sequence
  synthesized
gcgcgggaccgcagagcccg

SEQ ID NO: 457 - RNA, 20 nt, Artificial Sequence
  synthesized
gcucugcggucccgcgcggu

SEQ ID NO: 458 - RNA, 20 nt, Artificial Sequence
  synthesized
gcucugcggucccgcguggu

SEQ ID NO: 459 - RNA, 20 nt, Artificial Sequence
  synthesized
ggacggagcccaccacgcgg

SEQ ID NO: 460 - RNA, 20 nt, Artificial Sequence
  synthesized
ggacggagcccaccgcgcgg

SEQ ID NO: 461 - RNA, 20 nt, Artificial Sequence
  synthesized
ggcagggacggagcccacca

SEQ ID NO: 462 - RNA, 20 nt, Artificial Sequence
  synthesized
ggcucugcggucccgcgcgg

SEQ ID NO: 463 - RNA, 20 nt, Artificial Sequence
  synthesized
ggcucugcggucccgcgugg

SEQ ID NO: 464 - RNA, 20 nt, Artificial Sequence
  synthesized
gggacggagcccaccacgcg

SEQ ID NO: 465 - RNA, 20 nt, Artificial Sequence
  synthesized
gggacggagcccaccgcgcg

SEQ ID NO: 466 - RNA, 20 nt, Artificial Sequence
  synthesized
uguucuucuccuuagggucu

SEQ ID NO: 467 - RNA, 20 nt, Artificial Sequence
  synthesized
uuguucuucuccuuaggguc

SEQ ID NO: 468 - RNA, 20 nt, Artificial Sequence
  synthesized
uuuguucuucuccuuagggu

SEQ ID NO: 469 - RNA, 20 nt, Artificial Sequence
  synthesized
agccagguagaguggccccc

SEQ ID NO: 470 - RNA, 20 nt, Artificial Sequence
  synthesized
agccagguagaguggccucc

SEQ ID NO: 471 - RNA, 20 nt, Artificial Sequence
  synthesized
caccuggaggccacucuacc

SEQ ID NO: 472 - RNA, 20 nt, Artificial Sequence
  synthesized
caccugggggccacucuacc

SEQ ID NO: 473 - RNA, 20 nt, Artificial Sequence
  synthesized
caggcagugaggucaccugg

SEQ ID NO: 474 - RNA, 20 nt, Artificial Sequence
  synthesized
cagguagaguggcccccagg

SEQ ID NO: 475 - RNA, 20 nt, Artificial Sequence
  synthesized
cuccaggugaccucacugcc

SEQ ID NO: 476 - RNA, 20 nt, Artificial Sequence
  synthesized
gcaggcagugaggucaccug

SEQ ID NO: 477 - RNA, 20 nt, Artificial Sequence
  synthesized
gccagguagaguggccccca

SEQ ID NO: 478 - RNA, 20 nt, Artificial Sequence
  synthesized
gccagguagaguggccucca

SEQ ID NO: 479 - RNA, 20 nt, Artificial Sequence
  synthesized
ggaggccacucuaccuggcu

SEQ ID NO: 480 - RNA, 20 nt, Artificial Sequence
  synthesized
ggcaggcagugaggucaccu

SEQ ID NO: 481 - RNA, 20 nt, Artificial Sequence
  synthesized
uggaggccacucuaccuggc

SEQ ID NO: 482 - RNA, 20 nt, Artificial Sequence
  synthesized
uggcaggcagugaggucacc

SEQ ID NO: 483 - RNA, 20 nt, Artificial Sequence
  synthesized
ugggggccacucuaccuggc

SEQ ID NO: 484 - RNA, 20 nt, Artificial Sequence
  synthesized
uguguuucuccuuagggucu

SEQ ID NO: 485 - RNA, 20 nt, Artificial Sequence
  synthesized
uuguguuucuccuuaggguc

SEQ ID NO: 486 - RNA, 20 nt, Artificial Sequence
  synthesized
uuuguguuucuccuuagggu

SEQ ID NO: 487 - RNA, 20 nt, Artificial Sequence
  synthesized
aaauuuagagcuccugggcu

SEQ ID NO: 488 - RNA, 20 nt, Artificial Sequence
  synthesized
aaauuuggagcuccugggcu

SEQ ID NO: 489 - RNA, 20 nt, Artificial Sequence
  synthesized
aguagaaauuuagagcuccu

SEQ ID NO: 490 - RNA, 20 nt, Artificial Sequence
  synthesized
aguagaaauuuggagcuccu

SEQ ID NO: 491 - RNA, 20 nt, Artificial Sequence
  synthesized
auuuagagcuccugggcuuc

SEQ ID NO: 492 - RNA, 20 nt, Artificial Sequence
  synthesized
auuuggagcuccugggcuuc

SEQ ID NO: 493 - RNA, 20 nt, Artificial Sequence
  synthesized
gaguagaaauuuagagcucc

SEQ ID NO: 494 - RNA, 20 nt, Artificial Sequence
  synthesized
gaguagaaauuuggagcucc

SEQ ID NO: 495 - RNA, 20 nt, Artificial Sequence
  synthesized
gcuccaaauuucuacucucu

SEQ ID NO: 496 - RNA, 20 nt, Artificial Sequence
  synthesized
gcucuaaauuucuacucucu

SEQ ID NO: 497 - RNA, 20 nt, Artificial Sequence
  synthesized
ggagcuccaaauuucuacuc

SEQ ID NO: 498 - RNA, 20 nt, Artificial Sequence
  synthesized
ggagcucuaaauuucuacuc

SEQ ID NO: 499 - RNA, 20 nt, Artificial Sequence
  synthesized
aauggaggggggaggggugc

SEQ ID NO: 500 - RNA, 20 nt, Artificial Sequence
  synthesized
agaggauuggagguguccaa

SEQ ID NO: 501 - RNA, 20 nt, Artificial Sequence
  synthesized
agaggauuggagguguccag

SEQ ID NO: 502 - RNA, 20 nt, Artificial Sequence
  synthesized
agguguccaauggagggggg

SEQ ID NO: 503 - RNA, 20 nt, Artificial Sequence
  synthesized
agguguccaguggagggggg

SEQ ID NO: 504 - RNA, 20 nt, Artificial Sequence
  synthesized
aguggaggggggaggggugc

SEQ ID NO: 505 - RNA, 20 nt, Artificial Sequence
  synthesized
auuggagguguccaauggag

SEQ ID NO: 506 - RNA, 20 nt, Artificial Sequence
  synthesized
auuggagguguccaguggag

SEQ ID NO: 507 - RNA, 20 nt, Artificial Sequence
  synthesized
cugcaccccuccccccucca

SEQ ID NO: 508 - RNA, 20 nt, Artificial Sequence
  synthesized
cuggacaccuccaauccucu

SEQ ID NO: 509 - RNA, 20 nt, Artificial Sequence
  synthesized
gaggauuggagguguccaau

SEQ ID NO: 510 - RNA, 20 nt, Artificial Sequence
  synthesized
gaggauuggagguguccagu

SEQ ID NO: 511 - RNA, 20 nt, Artificial Sequence
  synthesized
gauuggagguguccaaugga

SEQ ID NO: 512 - RNA, 20 nt, Artificial Sequence
  synthesized
gcaccccuccccccuccauu

SEQ ID NO: 513 - RNA, 20 nt, Artificial Sequence
  synthesized
ggagguguccaauggagggg

SEQ ID NO: 514 - RNA, 20 nt, Artificial Sequence
  synthesized
ggagguguccaguggagggg

SEQ ID NO: 515 - RNA, 20 nt, Artificial Sequence
  synthesized
ggauuggagguguccaaugg

SEQ ID NO: 516 - RNA, 20 nt, Artificial Sequence
  synthesized
ggauuggagguguccagugg

SEQ ID NO: 517 - RNA, 20 nt, Artificial Sequence
  synthesized
gguguccaauggagggggga

SEQ ID NO: 518 - RNA, 20 nt, Artificial Sequence
  synthesized
gguguccaguggagggggga

SEQ ID NO: 519 - RNA, 20 nt, Artificial Sequence
  synthesized
guguccaguggaggggggag

SEQ ID NO: 520 - RNA, 20 nt, Artificial Sequence
  synthesized
uccccccuccacuggacacc

SEQ ID NO: 521 - RNA, 20 nt, Artificial Sequence
  synthesized
uccccccuccauuggacacc

SEQ ID NO: 522 - RNA, 20 nt, Artificial Sequence
  synthesized
ugcaccccuccccccuccac

SEQ ID NO: 523 - RNA, 20 nt, Artificial Sequence
  synthesized
ugcaccccuccccccuccau

SEQ ID NO: 524 - RNA, 20 nt, Artificial Sequence
  synthesized
uggagguguccaauggaggg

SEQ ID NO: 525 - RNA, 20 nt, Artificial Sequence
  synthesized
uggagguguccaguggaggg

SEQ ID NO: 526 - RNA, 20 nt, Artificial Sequence
  synthesized
uguccaauggaggggggagg

SEQ ID NO: 527 - RNA, 20 nt, Artificial Sequence
  synthesized
uuggacaccuccaauccucu

SEQ ID NO: 528 - RNA, 20 nt, Artificial Sequence
  synthesized
uuggagguguccaauggagg

SEQ ID NO: 529 - RNA, 20 nt, Artificial Sequence
  synthesized
uuggagguguccaguggagg

SEQ ID NO: 530 - RNA, 20 nt, Artificial Sequence
  synthesized
aaaugcugaggggcagggac

SEQ ID NO: 531 - RNA, 20 nt, Artificial Sequence
  synthesized
acagaggcucugaccaggcc

SEQ ID NO: 532 - RNA, 20 nt, Artificial Sequence
  synthesized
aggggcagggacagaggcuc

SEQ ID NO: 533 - RNA, 20 nt, Artificial Sequence
  synthesized
aggggcagggccagaggcuc

SEQ ID NO: 534 - RNA, 20 nt, Artificial Sequence
  synthesized
augcugaggggcagggacag

SEQ ID NO: 535 - RNA, 20 nt, Artificial Sequence
  synthesized
cagagccucuggcccugccc

SEQ ID NO: 536 - RNA, 20 nt, Artificial Sequence
  synthesized
cagggacagaggcucugacc

SEQ ID NO: 537 - RNA, 20 nt, Artificial Sequence
  synthesized
cagggccagaggcucugacc

SEQ ID NO: 538 - RNA, 20 nt, Artificial Sequence
  synthesized
ccagaggcucugaccaggcc

SEQ ID NO: 539 - RNA, 20 nt, Artificial Sequence
  synthesized
cugucccugccccucagcau

SEQ ID NO: 540 - RNA, 20 nt, Artificial Sequence
  synthesized
gacagaggcucugaccaggc

SEQ ID NO: 541 - RNA, 20 nt, Artificial Sequence
  synthesized
gccagaggcucugaccaggc

SEQ ID NO: 542 - RNA, 20 nt, Artificial Sequence
  synthesized
ggcagggacagaggcucuga

SEQ ID NO: 543 - RNA, 20 nt, Artificial Sequence
  synthesized
ggcagggccagaggcucuga

SEQ ID NO: 544 - RNA, 20 nt, Artificial Sequence
  synthesized
ugaggggcagggccagaggc

SEQ ID NO: 545 - RNA, 20 nt, Artificial Sequence
  synthesized
cuugggaggcugagguggga

SEQ ID NO: 546 - RNA, 20 nt, Artificial Sequence
  synthesized
ggcucacacaguccucccac

SEQ ID NO: 547 - RNA, 20 nt, Artificial Sequence
  synthesized
ugggaggacugugugagccc

SEQ ID NO: 548 - RNA, 20 nt, Artificial Sequence
  synthesized
aucuguccauggacccuaga

SEQ ID NO: 549 - RNA, 20 nt, Artificial Sequence
  synthesized
aucuguccguggacccuaga

SEQ ID NO: 550 - RNA, 20 nt, Artificial Sequence
  synthesized
auggacccuagaggaaaauu

SEQ ID NO: 551 - RNA, 20 nt, Artificial Sequence
  synthesized
cacggacagauggguaauau

SEQ ID NO: 552 - RNA, 20 nt, Artificial Sequence
  synthesized
caucuguccauggacccuag

SEQ ID NO: 553 - RNA, 20 nt, Artificial Sequence
  synthesized
caucuguccguggacccuag

SEQ ID NO: 554 - RNA, 20 nt, Artificial Sequence
  synthesized
cauggacagauggguaauau

SEQ ID NO: 555 - RNA, 20 nt, Artificial Sequence
  synthesized
cauggacccuagaggaaaau

SEQ ID NO: 556 - RNA, 20 nt, Artificial Sequence
  synthesized
cccaucuguccauggacccu

SEQ ID NO: 557 - RNA, 20 nt, Artificial Sequence
  synthesized
cccaucuguccguggacccu

SEQ ID NO: 558 - RNA, 20 nt, Artificial Sequence
  synthesized
ccucuaggguccacggacag

SEQ ID NO: 559 - RNA, 20 nt, Artificial Sequence
  synthesized
ccucuaggguccauggacag

SEQ ID NO: 560 - RNA, 20 nt, Artificial Sequence
  synthesized
cguggacccuagaggaaaau

SEQ ID NO: 561 - RNA, 20 nt, Artificial Sequence
  synthesized
cuaggguccacggacagaug

SEQ ID NO: 562 - RNA, 20 nt, Artificial Sequence
  synthesized
cuaggguccauggacagaug

SEQ ID NO: 563 - RNA, 20 nt, Artificial Sequence
  synthesized
cuauauuacccaucugucca

SEQ ID NO: 564 - RNA, 20 nt, Artificial Sequence
  synthesized
cuauauuacccaucuguccg

SEQ ID NO: 565 - RNA, 20 nt, Artificial Sequence
  synthesized
cucuaggguccacggacaga

SEQ ID NO: 566 - RNA, 20 nt, Artificial Sequence
  synthesized
cucuaggguccauggacaga

SEQ ID NO: 567 - RNA, 20 nt, Artificial Sequence
  synthesized
uauauuacccaucuguccau

SEQ ID NO: 568 - RNA, 20 nt, Artificial Sequence
  synthesized
uauauuacccaucuguccgu

SEQ ID NO: 569 - RNA, 20 nt, Artificial Sequence
  synthesized
ucuaggguccacggacagau

SEQ ID NO: 570 - RNA, 20 nt, Artificial Sequence
  synthesized
ucuaggguccauggacagau

SEQ ID NO: 571 - RNA, 20 nt, Artificial Sequence
  synthesized
uuccucuaggguccacggac

SEQ ID NO: 572 - RNA, 20 nt, Artificial Sequence
  synthesized
uuccucuaggguccauggac

SEQ ID NO: 573 - RNA, 20 nt, Artificial Sequence
  synthesized
acaauaggugaaucugugua

SEQ ID NO: 574 - RNA, 20 nt, Artificial Sequence
  synthesized
aucuggguaaacagccugug

SEQ ID NO: 575 - RNA, 20 nt, Artificial Sequence
  synthesized
aucuguguaaacagccugug

SEQ ID NO: 576 - RNA, 20 nt, Artificial Sequence
  synthesized
cacucacaggcuguuuacac

SEQ ID NO: 577 - RNA, 20 nt, Artificial Sequence
  synthesized
cacucacaggcuguuuaccc

SEQ ID NO: 578 - RNA, 20 nt, Artificial Sequence
  synthesized
cucacaggcuguuuacacag

SEQ ID NO: 579 - RNA, 20 nt, Artificial Sequence
  synthesized
cucacaggcuguuuacccag

SEQ ID NO: 580 - RNA, 20 nt, Artificial Sequence
  synthesized
gaaucuggguaaacagccug

SEQ ID NO: 581 - RNA, 20 nt, Artificial Sequence
  synthesized
gaaucuguguaaacagccug

SEQ ID NO: 582 - RNA, 20 nt, Artificial Sequence
  synthesized
gugaaucuggguaaacagcc

SEQ ID NO: 583 - RNA, 20 nt, Artificial Sequence
  synthesized
gugaaucuguguaaacagcc

SEQ ID NO: 584 - RNA, 20 nt, Artificial Sequence
  synthesized
ccccgguaaggggucacagg

SEQ ID NO: 585 - RNA, 20 nt, Artificial Sequence
  synthesized
ccccggugaggggucacagg

SEQ ID NO: 586 - RNA, 20 nt, Artificial Sequence
  synthesized
ccggcccugugaccccucac

SEQ ID NO: 587 - RNA, 20 nt, Artificial Sequence
  synthesized
ccggcccugugaccccuuac

SEQ ID NO: 588 - RNA, 20 nt, Artificial Sequence
  synthesized
ccgguaaggggucacagggc

SEQ ID NO: 589 - RNA, 20 nt, Artificial Sequence
  synthesized
ccggugaggggucacagggc

SEQ ID NO: 590 - RNA, 20 nt, Artificial Sequence
  synthesized
ccucaccgggggccgugggc

SEQ ID NO: 591 - RNA, 20 nt, Artificial Sequence
  synthesized
ccuuaccgggggccgugggc

SEQ ID NO: 592 - RNA, 20 nt, Artificial Sequence
  synthesized
cggcccccgguaagggguca

SEQ ID NO: 593 - RNA, 20 nt, Artificial Sequence
  synthesized
cggcccccggugagggguca

SEQ ID NO: 594 - RNA, 20 nt, Artificial Sequence
  synthesized
cggcccugugaccccucacc

SEQ ID NO: 595 - RNA, 20 nt, Artificial Sequence
  synthesized
cggcccugugaccccuuacc

SEQ ID NO: 596 - RNA, 20 nt, Artificial Sequence
  synthesized
cgggcccacggcccccggua

SEQ ID NO: 597 - RNA, 20 nt, Artificial Sequence
  synthesized
cgggcccacggcccccggug

SEQ ID NO: 598 - RNA, 20 nt, Artificial Sequence
  synthesized
cucaccgggggccgugggcc

SEQ ID NO: 599 - RNA, 20 nt, Artificial Sequence
  synthesized
cuuaccgggggccgugggcc

SEQ ID NO: 600 - RNA, 20 nt, Artificial Sequence
  synthesized
gaccccucaccgggggccgu

SEQ ID NO: 601 - RNA, 20 nt, Artificial Sequence
  synthesized
gaccccuuaccgggggccgu

SEQ ID NO: 602 - RNA, 20 nt, Artificial Sequence
  synthesized
gcccacggcccccgguaagg

SEQ ID NO: 603 - RNA, 20 nt, Artificial Sequence
  synthesized
gcccacggcccccggugagg

SEQ ID NO: 604 - RNA, 20 nt, Artificial Sequence
  synthesized
gcccccgguaaggggucaca

SEQ ID NO: 605 - RNA, 20 nt, Artificial Sequence
  synthesized
gcccccggugaggggucaca

SEQ ID NO: 606 - RNA, 20 nt, Artificial Sequence
  synthesized
gcccugugaccccucaccgg

SEQ ID NO: 607 - RNA, 20 nt, Artificial Sequence
  synthesized
gcccugugaccccuuaccgg

SEQ ID NO: 608 - RNA, 20 nt, Artificial Sequence
  synthesized
ggcccacggcccccgguaag

SEQ ID NO: 609 - RNA, 20 nt, Artificial Sequence
  synthesized
ggcccacggcccccggugag

SEQ ID NO: 610 - RNA, 20 nt, Artificial Sequence
  synthesized
ggcccccgguaaggggucac

SEQ ID NO: 611 - RNA, 20 nt, Artificial Sequence
  synthesized
ggcccccggugaggggucac

SEQ ID NO: 612 - RNA, 20 nt, Artificial Sequence
  synthesized
ggcccugugaccccucaccg

SEQ ID NO: 613 - RNA, 20 nt, Artificial Sequence
  synthesized
ggcccugugaccccuuaccg

SEQ ID NO: 614 - RNA, 20 nt, Artificial Sequence
  synthesized
gggcccacggcccccgguaa

SEQ ID NO: 615 - RNA, 20 nt, Artificial Sequence
  synthesized
gggcccacggcccccgguga

SEQ ID NO: 616 - RNA, 20 nt, Artificial Sequence
  synthesized
gugaccccucaccgggggcc

SEQ ID NO: 617 - RNA, 20 nt, Artificial Sequence
  synthesized
gugaccccuuaccgggggcc

SEQ ID NO: 618 - RNA, 20 nt, Artificial Sequence
  synthesized
ugaccccucaccgggggccg

SEQ ID NO: 619 - RNA, 20 nt, Artificial Sequence
  synthesized
ugaccccuuaccgggggccg

SEQ ID NO: 620 - RNA, 20 nt, Artificial Sequence
  synthesized
ugugaccccucaccgggggc

SEQ ID NO: 621 - RNA, 20 nt, Artificial Sequence
  synthesized
ugugaccccuuaccgggggc

SEQ ID NO: 622 - RNA, 20 nt, Artificial Sequence
  synthesized
aaggcuccgguagcaccuuc

SEQ ID NO: 623 - RNA, 20 nt, Artificial Sequence
  synthesized
aaggugcuaccggagccucc

SEQ ID NO: 624 - RNA, 20 nt, Artificial Sequence
  synthesized
accggagccuuccagagcgg

SEQ ID NO: 625 - RNA, 20 nt, Artificial Sequence
  synthesized
agccuuccagagcggagggu

SEQ ID NO: 626 - RNA, 20 nt, Artificial Sequence
  synthesized
aggugcuaccggagccuccc

SEQ ID NO: 627 - RNA, 20 nt, Artificial Sequence
  synthesized
aggugcuaccggagccuucc

SEQ ID NO: 628 - RNA, 20 nt, Artificial Sequence
  synthesized
cccuccgcucuggaaggcuc

SEQ ID NO: 629 - RNA, 20 nt, Artificial Sequence
  synthesized
ccggagccuuccagagcgga

SEQ ID NO: 630 - RNA, 20 nt, Artificial Sequence
  synthesized
ccuccgcucuggaaggcucc

SEQ ID NO: 631 - RNA, 20 nt, Artificial Sequence
  synthesized
cuaccggagccuuccagagc

SEQ ID NO: 632 - RNA, 20 nt, Artificial Sequence
  synthesized
cucuuacccuccgcucugga

SEQ ID NO: 633 - RNA, 20 nt, Artificial Sequence
  synthesized
gaggcuccgguagcaccuuc

SEQ ID NO: 634 - RNA, 20 nt, Artificial Sequence
  synthesized
gccuuccagagcggagggua

SEQ ID NO: 635 - RNA, 20 nt, Artificial Sequence
  synthesized
gcuaccggagccuuccagag

SEQ ID NO: 636 - RNA, 20 nt, Artificial Sequence
  synthesized
gugcuaccggagccuuccag

SEQ ID NO: 637 - RNA, 20 nt, Artificial Sequence
  synthesized
uacccuccgcucuggaaggc

SEQ ID NO: 638 - RNA, 20 nt, Artificial Sequence
  synthesized
uaccggagccuuccagagcg

SEQ ID NO: 639 - RNA, 20 nt, Artificial Sequence
  synthesized
uccgcucuggaaggcuccgg

SEQ ID NO: 640 - RNA, 20 nt, Artificial Sequence
  synthesized
cagcugcagcccagccaggu

SEQ ID NO: 641 - RNA, 20 nt, Artificial Sequence
  synthesized
gcugcagcccagccagguag

SEQ ID NO: 642 - RNA, 20 nt, Artificial Sequence
  synthesized
ggcugggagggcagcugcag

SEQ ID NO: 643 - RNA, 20 nt, Artificial Sequence
  synthesized
ggugggcugggagggcagcu

SEQ ID NO: 644 - RNA, 20 nt, Artificial Sequence
  synthesized
ugcagcccagccagguagag

SEQ ID NO: 645 - RNA, 20 nt, Artificial Sequence
  synthesized
uggagcccagccagguagag

SEQ ID NO: 646 - RNA, 20 nt, Artificial Sequence
  synthesized
acagaaaauccucucuccuu

SEQ ID NO: 647 - RNA, 20 nt, Artificial Sequence
  synthesized
augcgguaagcuguggaggu

SEQ ID NO: 648 - RNA, 20 nt, Artificial Sequence
  synthesized
augcgguaagcuguggcggu

SEQ ID NO: 649 - RNA, 20 nt, Artificial Sequence
  synthesized
cgguaagcuguggagguggg

SEQ ID NO: 650 - RNA, 20 nt, Artificial Sequence
  synthesized
cgguaagcuguggcgguggg

SEQ ID NO: 651 - RNA, 20 nt, Artificial Sequence
  synthesized
cgucccccaccgccacagcu

SEQ ID NO: 652 - RNA, 20 nt, Artificial Sequence
  synthesized
cgucccccaccuccacagcu

SEQ ID NO: 653 - RNA, 20 nt, Artificial Sequence
  synthesized
gaugcgguaagcuguggagg

SEQ ID NO: 654 - RNA, 20 nt, Artificial Sequence
  synthesized
gaugcgguaagcuguggcgg

SEQ ID NO: 655 - RNA, 20 nt, Artificial Sequence
  synthesized
gccacagcuuaccgcaucca

SEQ ID NO: 656 - RNA, 20 nt, Artificial Sequence
  synthesized
gcgguaagcuguggaggugg

SEQ ID NO: 657 - RNA, 20 nt, Artificial Sequence
  synthesized
gcgguaagcuguggcggugg

SEQ ID NO: 658 - RNA, 20 nt, Artificial Sequence
  synthesized
gcuguggaggugggggacgc

SEQ ID NO: 659 - RNA, 20 nt, Artificial Sequence
  synthesized
gcuguggcggugggggacgc

SEQ ID NO: 660 - RNA, 20 nt, Artificial Sequence
  synthesized
uccacagcuuaccgcaucca

SEQ ID NO: 661 - RNA, 20 nt, Artificial Sequence
  synthesized
ucccccaccgccacagcuua

SEQ ID NO: 662 - RNA, 20 nt, Artificial Sequence
  synthesized
ucccccaccuccacagcuua

SEQ ID NO: 663 - RNA, 20 nt, Artificial Sequence
  synthesized
ugcgguaagcuguggaggug

SEQ ID NO: 664 - RNA, 20 nt, Artificial Sequence
  synthesized
ugcgguaagcuguggcggug

SEQ ID NO: 665 - RNA, 20 nt, Artificial Sequence
  synthesized
uggaugcgguaagcugugga

SEQ ID NO: 666 - RNA, 20 nt, Artificial Sequence
  synthesized
uggaugcgguaagcuguggc

SEQ ID NO: 667 - RNA, 20 nt, Artificial Sequence
  synthesized
uguggaggugggggacgccg

SEQ ID NO: 668 - RNA, 20 nt, Artificial Sequence
  synthesized
uguggcggugggggacgccg

SEQ ID NO: 669 - RNA, 20 nt, Artificial Sequence
  synthesized
acaaguccugcccccagcag

SEQ ID NO: 670 - RNA, 20 nt, Artificial Sequence
  synthesized
agacggggcugcugggggcg

SEQ ID NO: 671 - RNA, 20 nt, Artificial Sequence
  synthesized
cagguacaaguccugccccc

SEQ ID NO: 672 - RNA, 20 nt, Artificial Sequence
  synthesized
cugggggcaggacuuguacc

SEQ ID NO: 673 - RNA, 20 nt, Artificial Sequence
  synthesized
cugggggcgggacuuguacc

SEQ ID NO: 674 - RNA, 20 nt, Artificial Sequence
  synthesized
gcucagguacaagucccgcc

SEQ ID NO: 675 - RNA, 20 nt, Artificial Sequence
  synthesized
gcucagguacaaguccugcc

SEQ ID NO: 676 - RNA, 20 nt, Artificial Sequence
  synthesized
agggcccagacccuaaggaa

SEQ ID NO: 677 - RNA, 20 nt, Artificial Sequence
  synthesized
aagugagcuuguaccagaaa

SEQ ID NO: 678 - RNA, 20 nt, Artificial Sequence
  synthesized
aagugagcuugugccagaaa

SEQ ID NO: 679 - RNA, 20 nt, Artificial Sequence
  synthesized
agugagcuuguaccagaaau

SEQ ID NO: 680 - RNA, 20 nt, Artificial Sequence
  synthesized
agugagcuugugccagaaau

SEQ ID NO: 681 - RNA, 20 nt, Artificial Sequence
  synthesized
guaggaagugagcuuguacc

SEQ ID NO: 682 - RNA, 20 nt, Artificial Sequence
  synthesized
guaggaagugagcuugugcc

SEQ ID NO: 683 - RNA, 20 nt, Artificial Sequence
  synthesized
uugcugcagacuuccauuuc

SEQ ID NO: 684 - RNA, 20 nt, Artificial Sequence
  synthesized
uuguaccagaaauggaaguc

SEQ ID NO: 685 - RNA, 20 nt, Artificial Sequence
  synthesized
uugugccagaaauggaaguc

SEQ ID NO: 686 - RNA, 20 nt, Artificial Sequence
  synthesized
cagaagaauggcaugaaccc

SEQ ID NO: 687 - RNA, 20 nt, Artificial Sequence
  synthesized
gguucaugccauucuucugc

SEQ ID NO: 688 - RNA, 20 nt, Artificial Sequence
  synthesized
acagggccucgugcuccgaa

SEQ ID NO: 689 - RNA, 20 nt, Artificial Sequence
  synthesized
acagggccucgugcucugaa

SEQ ID NO: 690 - RNA, 20 nt, Artificial Sequence
  synthesized
agcuugggcccuucggagca

SEQ ID NO: 691 - RNA, 20 nt, Artificial Sequence
  synthesized
cacagggccucgugcuccga

SEQ ID NO: 692 - RNA, 20 nt, Artificial Sequence
  synthesized
cacagggccucgugcucuga

SEQ ID NO: 693 - RNA, 20 nt, Artificial Sequence
  synthesized
cccuucagagcacgaggccc

SEQ ID NO: 694 - RNA, 20 nt, Artificial Sequence
  synthesized
cccuucggagcacgaggccc

SEQ ID NO: 695 - RNA, 20 nt, Artificial Sequence
  synthesized
cuugggcccuucagagcacg

SEQ ID NO: 696 - RNA, 20 nt, Artificial Sequence
  synthesized
cuugggcccuucggagcacg

SEQ ID NO: 697 - RNA, 20 nt, Artificial Sequence
  synthesized
ucagagcacgaggcccugug

SEQ ID NO: 698 - RNA, 20 nt, Artificial Sequence
  synthesized
ucggagcacgaggcccugug

SEQ ID NO: 699 - RNA, 20 nt, Artificial Sequence
  synthesized
ugcuccgaagggcccaagcu

SEQ ID NO: 700 - RNA, 20 nt, Artificial Sequence
  synthesized
ugcucugaagggcccaagcu

SEQ ID NO: 701 - RNA, 20 nt, Artificial Sequence
  synthesized
aggccaguucucuugagaag

SEQ ID NO: 702 - RNA, 20 nt, Artificial Sequence
  synthesized
ccaggccaguucucuugaga

SEQ ID NO: 703 - RNA, 20 nt, Artificial Sequence
  synthesized
ccggccgcgccuucuccagc

SEQ ID NO: 704 - RNA, 20 nt, Artificial Sequence
  synthesized
ccgggccaguucucuugaga

SEQ ID NO: 705 - RNA, 20 nt, Artificial Sequence
  synthesized
cgcggccaggccaguucucu

SEQ ID NO: 706 - RNA, 20 nt, Artificial Sequence
  synthesized
cgcggccgggccaguucucu

SEQ ID NO: 707 - RNA, 20 nt, Artificial Sequence
  synthesized
cggccaggccaguucucuug

SEQ ID NO: 708 - RNA, 20 nt, Artificial Sequence
  synthesized
cggccgggccaguucucuug

SEQ ID NO: 709 - RNA, 20 nt, Artificial Sequence
  synthesized
cucaagagaacuggcccggc

SEQ ID NO: 710 - RNA, 20 nt, Artificial Sequence
  synthesized
cucaagagaacuggccuggc

SEQ ID NO: 711 - RNA, 20 nt, Artificial Sequence
  synthesized
cuggccgcgccuucuccagc

SEQ ID NO: 712 - RNA, 20 nt, Artificial Sequence
  synthesized
gggccaguucucuugagaag

SEQ ID NO: 713 - RNA, 20 nt, Artificial Sequence
  synthesized
ucucaagagaacuggcccgg

SEQ ID NO: 714 - RNA, 20 nt, Artificial Sequence
  synthesized
ucucaagagaacuggccugg

SEQ ID NO: 715 - RNA, 20 nt, Artificial Sequence
  synthesized
agugugauggggacaagacg

SEQ ID NO: 716 - RNA, 20 nt, Artificial Sequence
  synthesized
auggggacaagacggggagg

SEQ ID NO: 717 - RNA, 20 nt, Artificial Sequence
  synthesized
ccaucacacucacgcagccc

SEQ ID NO: 718 - RNA, 20 nt, Artificial Sequence
  synthesized
cccaucacacucacgcagcc

SEQ ID NO: 719 - RNA, 20 nt, Artificial Sequence
  synthesized
cccgucacacucacgcagcc

SEQ ID NO: 720 - RNA, 20 nt, Artificial Sequence
  synthesized
ccgggcugcgugagugugac

SEQ ID NO: 721 - RNA, 20 nt, Artificial Sequence
  synthesized
ccgggcugcgugagugugau

SEQ ID NO: 722 - RNA, 20 nt, Artificial Sequence
  synthesized
ccgucacacucacgcagccc

SEQ ID NO: 723 - RNA, 20 nt, Artificial Sequence
  synthesized
ccgucuuguccccaucacac

SEQ ID NO: 724 - RNA, 20 nt, Artificial Sequence
  synthesized
cgggcugcgugagugugacg

SEQ ID NO: 725 - RNA, 20 nt, Artificial Sequence
  synthesized
gagugugauggggacaagac

SEQ ID NO: 726 - RNA, 20 nt, Artificial Sequence
  synthesized
gcgugagugugauggggaca

SEQ ID NO: 727 - RNA, 20 nt, Artificial Sequence
  synthesized
ggcugcgugagugugacggg

SEQ ID NO: 728 - RNA, 20 nt, Artificial Sequence
  synthesized
gggcugcgugagugugacgg

SEQ ID NO: 729 - RNA, 20 nt, Artificial Sequence
  synthesized
gugauggggacaagacgggg

SEQ ID NO: 730 - RNA, 20 nt, Artificial Sequence
  synthesized
ucuuguccccaucacacuca

SEQ ID NO: 731 - RNA, 20 nt, Artificial Sequence
  synthesized
ugagugugauggggacaaga

SEQ ID NO: 732 - RNA, 20 nt, Artificial Sequence
  synthesized
ugauggggacaagacgggga

SEQ ID NO: 733 - RNA, 20 nt, Artificial Sequence
  synthesized
uggggacaagacggggaggu

SEQ ID NO: 734 - RNA, 20 nt, Artificial Sequence
  synthesized
aaauaccacggcacauggcc

SEQ ID NO: 735 - RNA, 20 nt, Artificial Sequence
  synthesized
aaauaccauggcacauggcc

SEQ ID NO: 736 - RNA, 20 nt, Artificial Sequence
  synthesized
aggacccaaauaccacggca

SEQ ID NO: 737 - RNA, 20 nt, Artificial Sequence
  synthesized
aggacccaaauaccauggca

SEQ ID NO: 738 - RNA, 20 nt, Artificial Sequence
  synthesized
aggccaugugccaugguauu

SEQ ID NO: 739 - RNA, 20 nt, Artificial Sequence
  synthesized
aggccaugugccgugguauu

SEQ ID NO: 740 - RNA, 20 nt, Artificial Sequence
  synthesized
augguauuuggguccuggga

SEQ ID NO: 741 - RNA, 20 nt, Artificial Sequence
  synthesized
caggccaugugccaugguau

SEQ ID NO: 742 - RNA, 20 nt, Artificial Sequence
  synthesized
caggccaugugccgugguau

SEQ ID NO: 743 - RNA, 20 nt, Artificial Sequence
  synthesized
gcccagacccuaaggagaag

SEQ ID NO: 744 - RNA, 20 nt, Artificial Sequence
  synthesized
ggcccagacccuaaggagaa

SEQ ID NO: 745 - RNA, 20 nt, Artificial Sequence
  synthesized
ccagacccuaaggagaagca

SEQ ID NO: 746 - RNA, 20 nt, Artificial Sequence
  synthesized
cccagacccuaaggagaagc

SEQ ID NO: 747 - RNA, 20 nt, Artificial Sequence
  synthesized
acccuaaggagaagcacaaa

SEQ ID NO: 748 - RNA, 20 nt, Artificial Sequence
  synthesized
agacccuaaggagaagcaca

SEQ ID NO: 749 - RNA, 20 nt, Artificial Sequence
  synthesized
cagacccuaaggagaagcac

SEQ ID NO: 750 - RNA, 20 nt, Artificial Sequence
  synthesized
cccuaaggagaagcacaaaa

SEQ ID NO: 751 - RNA, 20 nt, Artificial Sequence
  synthesized
gugcuucuccuuagggucug

SEQ ID NO: 752 - RNA, 20 nt, Artificial Sequence
  synthesized
cucucuucuucuuucauacc

SEQ ID NO: 753 - RNA, 20 nt, Artificial Sequence
  synthesized
cucuucuucuuucauaccuc

SEQ ID NO: 754 - RNA, 20 nt, Artificial Sequence
  synthesized
cuucuucuuucauaccucaa

SEQ ID NO: 755 - RNA, 20 nt, Artificial Sequence
  synthesized
ucucucuucuucuuucauac

SEQ ID NO: 756 - RNA, 20 nt, Artificial Sequence
  synthesized
ucucuucuucuuucauaccu

SEQ ID NO: 757 - RNA, 20 nt, Artificial Sequence
  synthesized
ugagguaugaaagaagaaga

SEQ ID NO: 758 - RNA, 20 nt, Artificial Sequence
  synthesized
uugagguaugaaagaagaag

SEQ ID NO: 759 - RNA, 20 nt, Artificial Sequence
  synthesized
cucucucuucuucuuucaua

SEQ ID NO: 760 - RNA, 20 nt, Artificial Sequence
  synthesized
gagguaugaaagaagaagag

SEQ ID NO: 761 - RNA, 20 nt, Artificial Sequence
  synthesized
acuggaggaauaaauaaggg

SEQ ID NO: 762 - RNA, 20 nt, Artificial Sequence
  synthesized
aucuucuuucccagaccucc

SEQ ID NO: 763 - RNA, 20 nt, Artificial Sequence
  synthesized
gacuggaggaauaaauaagg

SEQ ID NO: 764 - RNA, 20 nt, Artificial Sequence
  synthesized
auccagaugucgccacuccc

SEQ ID NO: 765 - RNA, 20 nt, Artificial Sequence
  synthesized
aucuuggugucucggagucu

SEQ ID NO: 766 - RNA, 20 nt, Artificial Sequence
  synthesized
uauccagaugucgccacucc

SEQ ID NO: 767 - RNA, 20 nt, Artificial Sequence
  synthesized
uuauccagaugucgccacuc

SEQ ID NO: 768 - RNA, 20 nt, Artificial Sequence
  synthesized
ggggaagucucgggccucuc

SEQ ID NO: 769 - RNA, 20 nt, Artificial Sequence
  synthesized
guuggggaagucucgggccu

SEQ ID NO: 770 - RNA, 20 nt, Artificial Sequence
  synthesized
uggggaagucucgggccucu

SEQ ID NO: 771 - RNA, 20 nt, Artificial Sequence
  synthesized
uuggggaagucucgggccuc

SEQ ID NO: 772 - RNA, 20 nt, Artificial Sequence
  synthesized
auacgucucggcaauguucc

SEQ ID NO: 773 - RNA, 20 nt, Artificial Sequence
  synthesized
caauacgucucggcaauguu

SEQ ID NO: 774 - RNA, 20 nt, Artificial Sequence
  synthesized
aggguucccagaggucaguu

SEQ ID NO: 775 - RNA, 20 nt, Artificial Sequence
  synthesized
cccugucaauuacuagcuga

SEQ ID NO: 776 - RNA, 20 nt, Artificial Sequence
  synthesized
ccugucaauuacuagcugag

SEQ ID NO: 777 - RNA, 20 nt, Artificial Sequence
  synthesized
cugucaauuacuagcugaga

SEQ ID NO: 778 - RNA, 20 nt, Artificial Sequence
  synthesized
ggguucccagaggucaguug

SEQ ID NO: 779 - RNA, 20 nt, Artificial Sequence
  synthesized
ugaggguucccagaggucag

SEQ ID NO: 780 - RNA, 20 nt, Artificial Sequence
  synthesized
acuccgagacaccaagauuu

SEQ ID NO: 781 - RNA, 20 nt, Artificial Sequence
  synthesized
agacuccgagacaccaagau

SEQ ID NO: 782 - RNA, 20 nt, Artificial Sequence
  synthesized
gacuccgagacaccaagauu

SEQ ID NO: 783 - RNA, 20 nt, Artificial Sequence
  synthesized
gcaggaauauaaaggaaugu

SEQ ID NO: 784 - RNA, 20 nt, Artificial Sequence
  synthesized
aguggagugggcagggcuga

SEQ ID NO: 785 - RNA, 20 nt, Artificial Sequence
  synthesized
gcugagugaaggugggaagg

SEQ ID NO: 786 - RNA, 20 nt, Artificial Sequence
  synthesized
ugagugaaggugggaaggaa

SEQ ID NO: 787 - RNA, 20 nt, Artificial Sequence
  synthesized
caucauguauauaacugacc

SEQ ID NO: 788 - RNA, 20 nt, Artificial Sequence
  synthesized
cauguauauaacugacccuc

SEQ ID NO: 789 - RNA, 20 nt, Artificial Sequence
  synthesized
caggacccccaccgugaaca

SEQ ID NO: 790 - RNA, 20 nt, Artificial Sequence
  synthesized
ggacccccaccgugaacacg

SEQ ID NO: 791 - RNA, 20 nt, Artificial Sequence
  synthesized
ugcugcagccccccgcccuc

SEQ ID NO: 792 - RNA, 20 nt, Artificial Sequence
  synthesized
acugcauugcugggcugugu

SEQ ID NO: 793 - RNA, 20 nt, Artificial Sequence
  synthesized
cugcauugcugggcuguguu

SEQ ID NO: 794 - RNA, 20 nt, Artificial Sequence
  synthesized
ggugcaagguccagaagagc

SEQ ID NO: 795 - RNA, 20 nt, Artificial Sequence
  synthesized
aggcaccugucgaguguauc

SEQ ID NO: 796 - RNA, 20 nt, Artificial Sequence
  synthesized
caggcaccugucgaguguau

SEQ ID NO: 797 - RNA, 20 nt, Artificial Sequence
  synthesized
ccaggcaccugucgagugua

SEQ ID NO: 798 - RNA, 20 nt, Artificial Sequence
  synthesized
ggcaccugucgaguguaucc

SEQ ID NO: 799 - RNA, 20 nt, Artificial Sequence
  synthesized
ggacaccuggcuuggguggg

SEQ ID NO: 800 - RNA, 20 nt, Artificial Sequence
  synthesized
uccccucugcugccugcaga

SEQ ID NO: 801 - RNA, 20 nt, Artificial Sequence
  synthesized
aacuggcugcuucuccugug

SEQ ID NO: 802 - RNA, 20 nt, Artificial Sequence
  synthesized
acuggcugcuucuccugugg

SEQ ID NO: 803 - RNA, 20 nt, Artificial Sequence
  synthesized
cuugggcaaguucccugauu

SEQ ID NO: 804 - RNA, 20 nt, Artificial Sequence
  synthesized
uugggcaaguucccugauua

SEQ ID NO: 805 - RNA, 20 nt, Artificial Sequence
  synthesized
agggguugcaauuucccauc

SEQ ID NO: 806 - RNA, 20 nt, Artificial Sequence
  synthesized
cguagggguugcaauuuccc

SEQ ID NO: 807 - RNA, 20 nt, Artificial Sequence
  synthesized
cucuuggaagaaucuagggg

SEQ ID NO: 808 - RNA, 20 nt, Artificial Sequence
  synthesized
cuuggaagaaucuaggggca

SEQ ID NO: 809 - RNA, 20 nt, Artificial Sequence
  synthesized
guagggguugcaauuuccca

SEQ ID NO: 810 - RNA, 20 nt, Artificial Sequence
  synthesized
ucuuggaagaaucuaggggc

SEQ ID NO: 811 - RNA, 20 nt, Artificial Sequence
  synthesized
agcggagaaucccugacccu

SEQ ID NO: 812 - RNA, 20 nt, Artificial Sequence
  synthesized
cggagaaucccugacccuca

SEQ ID NO: 813 - RNA, 20 nt, Artificial Sequence
  synthesized
gagcccugaguccagcaggg

SEQ ID NO: 814 - RNA, 20 nt, Artificial Sequence
  synthesized
gcggagaaucccugacccuc

SEQ ID NO: 815 - RNA, 20 nt, Artificial Sequence
  synthesized
cacaggggacucuuacccuc

SEQ ID NO: 816 - RNA, 20 nt, Artificial Sequence
  synthesized
cugcacaggggacucuuacc

SEQ ID NO: 817 - RNA, 20 nt, Artificial Sequence
  synthesized
gcacaggggacucuuacccu

SEQ ID NO: 818 - RNA, 20 nt, Artificial Sequence
  synthesized
ugcacaggggacucuuaccc

SEQ ID NO: 819 - RNA, 20 nt, Artificial Sequence
  synthesized
agcagugaucauggugaugc

SEQ ID NO: 820 - RNA, 20 nt, Artificial Sequence
  synthesized
cagcagugaucauggugaug

SEQ ID NO: 821 - RNA, 20 nt, Artificial Sequence
  synthesized
ccucgccacccagcagcacc

SEQ ID NO: 822 - RNA, 20 nt, Artificial Sequence
  synthesized
gcagcagugaucauggugau

SEQ ID NO: 823 - RNA, 20 nt, Artificial Sequence
  synthesized
gcagugaucauggugaugca

SEQ ID NO: 824 - RNA, 20 nt, Artificial Sequence
  synthesized
gauuaaugaacucgaucacc

SEQ ID NO: 825 - RNA, 20 nt, Artificial Sequence
  synthesized
ggauuaaugaacucgaucac

SEQ ID NO: 826 - RNA, 20 nt, Artificial Sequence
  synthesized
gggauuaaugaacucgauca

SEQ ID NO: 827 - RNA, 20 nt, Artificial Sequence
  synthesized
ggggauuaaugaacucgauc

SEQ ID NO: 828 - RNA, 20 nt, Artificial Sequence
  synthesized
accccgggcucugcgguccc

SEQ ID NO: 829 - RNA, 20 nt, Artificial Sequence
  synthesized
cccgggcucugcggucccgc

SEQ ID NO: 830 - RNA, 20 nt, Artificial Sequence
  synthesized
cggggcagggacggagccca

SEQ ID NO: 831 - RNA, 20 nt, Artificial Sequence
  synthesized
gcggggcagggacggagccc

SEQ ID NO: 832 - RNA, 20 nt, Artificial Sequence
  synthesized
gggcagggacggagcccacc

SEQ ID NO: 833 - RNA, 20 nt, Artificial Sequence
  synthesized
agcccagccagguagagugg

SEQ ID NO: 834 - RNA, 20 nt, Artificial Sequence
  synthesized
cccagccagguagaguggcc

SEQ ID NO: 835 - RNA, 20 nt, Artificial Sequence
  synthesized
gagcccagccagguagagug

SEQ ID NO: 836 - RNA, 20 nt, Artificial Sequence
  synthesized
gggccacucuaccuggcugg

SEQ ID NO: 837 - RNA, 20 nt, Artificial Sequence
  synthesized
augaccugaagcccaggagc

SEQ ID NO: 838 - RNA, 20 nt, Artificial Sequence
  synthesized
caugaccugaagcccaggag

SEQ ID NO: 839 - RNA, 20 nt, Artificial Sequence
  synthesized
gaccugaagcccaggagcuc

SEQ ID NO: 840 - RNA, 20 nt, Artificial Sequence
  synthesized
gcaaaucaagagaguagaaa

SEQ ID NO: 841 - RNA, 20 nt, Artificial Sequence
  synthesized
ugaccugaagcccaggagcu

SEQ ID NO: 842 - RNA, 20 nt, Artificial Sequence
  synthesized
aagaggauuggaggugucca

SEQ ID NO: 843 - RNA, 20 nt, Artificial Sequence
  synthesized
cacugcaccccuccccccuc

SEQ ID NO: 844 - RNA, 20 nt, Artificial Sequence
  synthesized
uccaagaggauuggaggugu

SEQ ID NO: 845 - RNA, 20 nt, Artificial Sequence
  synthesized
ccggccuggucagagccucu

SEQ ID NO: 846 - RNA, 20 nt, Artificial Sequence
  synthesized
cggccuggucagagccucug

SEQ ID NO: 847 - RNA, 20 nt, Artificial Sequence
  synthesized
cuccggccuggucagagccu

SEQ ID NO: 848 - RNA, 20 nt, Artificial Sequence
  synthesized
gguggaaaugcugaggggca

SEQ ID NO: 849 - RNA, 20 nt, Artificial Sequence
  synthesized
caucuauauuacccaucugu

SEQ ID NO: 850 - RNA, 20 nt, Artificial Sequence
  synthesized
ucaucuauauuacccaucug

SEQ ID NO: 851 - RNA, 20 nt, Artificial Sequence
  synthesized
aacacucacaggcuguuuac

SEQ ID NO: 852 - RNA, 20 nt, Artificial Sequence
  synthesized
aagaacacucacaggcuguu

SEQ ID NO: 853 - RNA, 20 nt, Artificial Sequence
  synthesized
agaacacucacaggcuguuu

SEQ ID NO: 854 - RNA, 20 nt, Artificial Sequence
  synthesized
gcucgggcccacggcccccg

SEQ ID NO: 855 - RNA, 20 nt, Artificial Sequence
  synthesized
ggaccggcccugugaccccu

SEQ ID NO: 856 - RNA, 20 nt, Artificial Sequence
  synthesized
gggaccggcccugugacccc

SEQ ID NO: 857 - RNA, 20 nt, Artificial Sequence
  synthesized
ggggaccggcccugugaccc

SEQ ID NO: 858 - RNA, 20 nt, Artificial Sequence
  synthesized
ucgggcccacggcccccggu

SEQ ID NO: 859 - RNA, 20 nt, Artificial Sequence
  synthesized
ugcuaccggagccucccaga

SEQ ID NO: 860 - RNA, 20 nt, Artificial Sequence
  synthesized
acccuccgcucugggaggcu

SEQ ID NO: 861 - RNA, 20 nt, Artificial Sequence
  synthesized
cccagagcggaggguaagag

SEQ ID NO: 862 - RNA, 20 nt, Artificial Sequence
  synthesized
ccgcucugggaggcuccggu

SEQ ID NO: 863 - RNA, 20 nt, Artificial Sequence
  synthesized
ccucccagagcggaggguaa

SEQ ID NO: 864 - RNA, 20 nt, Artificial Sequence
  synthesized
cgcucugggaggcuccggua

SEQ ID NO: 865 - RNA, 20 nt, Artificial Sequence
  synthesized
cggagccucccagagcggag

SEQ ID NO: 866 - RNA, 20 nt, Artificial Sequence
  synthesized
cucccagagcggaggguaag

SEQ ID NO: 867 - RNA, 20 nt, Artificial Sequence
  synthesized
cuccgcucugggaggcuccg

SEQ ID NO: 868 - RNA, 20 nt, Artificial Sequence
  synthesized
cuuacccuccgcucugggag

SEQ ID NO: 869 - RNA, 20 nt, Artificial Sequence
  synthesized
gagccucccagagcggaggg

SEQ ID NO: 870 - RNA, 20 nt, Artificial Sequence
  synthesized
ggagccucccagagcggagg

SEQ ID NO: 871 - RNA, 20 nt, Artificial Sequence
  synthesized
ucccagagcggaggguaaga

SEQ ID NO: 872 - RNA, 20 nt, Artificial Sequence
  synthesized
ucuuacccuccgcucuggga

SEQ ID NO: 873 - RNA, 20 nt, Artificial Sequence
  synthesized
uuacccuccgcucugggagg

SEQ ID NO: 874 - RNA, 20 nt, Artificial Sequence
  synthesized
acucuuacccuccgcucugg

SEQ ID NO: 875 - RNA, 20 nt, Artificial Sequence
  synthesized
acagaaggugcuaccggagc

SEQ ID NO: 876 - RNA, 20 nt, Artificial Sequence
  synthesized
agaaggugcuaccggagccu

SEQ ID NO: 877 - RNA, 20 nt, Artificial Sequence
  synthesized
cacagaaggugcuaccggag

SEQ ID NO: 878 - RNA, 20 nt, Artificial Sequence
  synthesized
cagaaggugcuaccggagcc

SEQ ID NO: 879 - RNA, 20 nt, Artificial Sequence
  synthesized
gagagagagagagagagaga

SEQ ID NO: 880 - RNA, 20 nt, Artificial Sequence
  synthesized
agagagagagagagagagag

SEQ ID NO: 881 - RNA, 20 nt, Artificial Sequence
  synthesized
cacucuaccuggcugggcuc

SEQ ID NO: 882 - RNA, 20 nt, Artificial Sequence
  synthesized
cucuaccuggcugggcucca

SEQ ID NO: 883 - RNA, 20 nt, Artificial Sequence
  synthesized
agcuggagcccagccaggua

SEQ ID NO: 884 - RNA, 20 nt, Artificial Sequence
  synthesized
cugggagggcagcuggagcc

SEQ ID NO: 885 - RNA, 20 nt, Artificial Sequence
  synthesized
gcugggcuccagcugcccuc

SEQ ID NO: 886 - RNA, 20 nt, Artificial Sequence
  synthesized
gggagggcagcuggagccca

SEQ ID NO: 887 - RNA, 20 nt, Artificial Sequence
  synthesized
uggcugggcuccagcugccc

SEQ ID NO: 888 - RNA, 20 nt, Artificial Sequence
  synthesized
gccacucuaccuggcugggc

SEQ ID NO: 889 - RNA, 20 nt, Artificial Sequence
  synthesized
ggccacucuaccuggcuggg

SEQ ID NO: 890 - RNA, 20 nt, Artificial Sequence
  synthesized
aguuggacagaaaauccucu

SEQ ID NO: 891 - RNA, 20 nt, Artificial Sequence
  synthesized
caguuggacagaaaauccuc

SEQ ID NO: 892 - RNA, 20 nt, Artificial Sequence
  synthesized
guuggacagaaaauccucuc

SEQ ID NO: 893 - RNA, 20 nt, Artificial Sequence
  synthesized
uuggacagaaaauccucucu

SEQ ID NO: 894 - RNA, 20 nt, Artificial Sequence
  synthesized
agcucacggcgucccccacc

SEQ ID NO: 895 - RNA, 20 nt, Artificial Sequence
  synthesized
cacguggaugcgguaagcug

SEQ ID NO: 896 - RNA, 20 nt, Artificial Sequence
  synthesized
ccgagcucacggcguccccc

SEQ ID NO: 897 - RNA, 20 nt, Artificial Sequence
  synthesized
cgagcucacggcguccccca

SEQ ID NO: 898 - RNA, 20 nt, Artificial Sequence
  synthesized
cguggaugcgguaagcugug

SEQ ID NO: 899 - RNA, 20 nt, Artificial Sequence
  synthesized
aggcagcucagguacaaguc

SEQ ID NO: 900 - RNA, 20 nt, Artificial Sequence
  synthesized
cggagacggggcugcugggg

SEQ ID NO: 901 - RNA, 20 nt, Artificial Sequence
  synthesized
aaaguccuggaaugugcagc

SEQ ID NO: 902 - RNA, 20 nt, Artificial Sequence
  synthesized
aauaggacagcuugggccug

SEQ ID NO: 903 - RNA, 20 nt, Artificial Sequence
  synthesized
aguccuggaaugugcagcuc

SEQ ID NO: 904 - RNA, 20 nt, Artificial Sequence
  synthesized
auaggacagcuugggccugg

SEQ ID NO: 905 - RNA, 20 nt, Artificial Sequence
  synthesized
gaauaggacagcuugggccu

SEQ ID NO: 906 - RNA, 20 nt, Artificial Sequence
  synthesized
guccuggaaugugcagcucc

SEQ ID NO: 907 - RNA, 20 nt, Artificial Sequence
  synthesized
acaggaccuacauccucaga

SEQ ID NO: 908 - RNA, 20 nt, Artificial Sequence
  synthesized
cacaggaccuacauccucag

SEQ ID NO: 909 - RNA, 20 nt, Artificial Sequence
  synthesized
caggaccuacauccucagau

SEQ ID NO: 910 - RNA, 20 nt, Artificial Sequence
  synthesized
ccacaggaccuacauccuca

SEQ ID NO: 911 - RNA, 20 nt, Artificial Sequence
  synthesized
ccuaaggagaagcacaaaaa

SEQ ID NO: 912 - RNA, 20 nt, Artificial Sequence
  synthesized
cuaaggagaagcacaaaaaa

SEQ ID NO: 913 - RNA, 20 nt, Artificial Sequence
  synthesized
gacccuaaggagaagcacaa

SEQ ID NO: 914 - RNA, 20 nt, Artificial Sequence
  synthesized
gcuucuccuuagggucuggg

SEQ ID NO: 915 - RNA, 20 nt, Artificial Sequence
  synthesized
ugcuucuccuuagggucugg

SEQ ID NO: 916 - RNA, 20 nt, Artificial Sequence
  synthesized
cagggcccagacccuaagga

SEQ ID NO: 917 - RNA, 20 nt, Artificial Sequence
  synthesized
cuucuccuuagggucugggc

SEQ ID NO: 918 - RNA, 20 nt, Artificial Sequence
  synthesized
agcagggcccagacccuaag

SEQ ID NO: 919 - RNA, 20 nt, Artificial Sequence
  synthesized
cugcagacuuccauuucugg

SEQ ID NO: 920 - RNA, 20 nt, Artificial Sequence
  synthesized
gcugcagacuuccauuucug

SEQ ID NO: 921 - RNA, 20 nt, Artificial Sequence
  synthesized
gguaaguaggaagugagcuu

SEQ ID NO: 922 - RNA, 20 nt, Artificial Sequence
  synthesized
guaaguaggaagugagcuug

SEQ ID NO: 923 - RNA, 20 nt, Artificial Sequence
  synthesized
uaaguaggaagugagcuugu

SEQ ID NO: 924 - RNA, 20 nt, Artificial Sequence
  synthesized
ugcugcagacuuccauuucu

SEQ ID NO: 925 - RNA, 20 nt, Artificial Sequence
  synthesized
agucacacagggccucgugc

SEQ ID NO: 926 - RNA, 20 nt, Artificial Sequence
  synthesized
auugaaccaagcuugggccc

SEQ ID NO: 927 - RNA, 20 nt, Artificial Sequence
  synthesized
cagucacacagggccucgug

SEQ ID NO: 928 - RNA, 20 nt, Artificial Sequence
  synthesized
gucacacagggccucgugcu

SEQ ID NO: 929 - RNA, 20 nt, Artificial Sequence
  synthesized
uugaaccaagcuugggcccu

SEQ ID NO: 930 - RNA, 20 nt, Artificial Sequence
  synthesized
cacuucucaagagaacuggc

SEQ ID NO: 931 - RNA, 20 nt, Artificial Sequence
  synthesized
cggaagcuggagaaggcgcg

SEQ ID NO: 932 - RNA, 20 nt, Artificial Sequence
  synthesized
cucacuucucaagagaacug

SEQ ID NO: 933 - RNA, 20 nt, Artificial Sequence
  synthesized
caccgggcugcgugagugug

SEQ ID NO: 934 - RNA, 20 nt, Artificial Sequence
  synthesized
ccguggauaccaggccaugu

SEQ ID NO: 935 - RNA, 20 nt, Artificial Sequence
  synthesized
ccucccaggacccaaauacc

SEQ ID NO: 936 - RNA, 20 nt, Artificial Sequence
  synthesized
cguggauaccaggccaugug

SEQ ID NO: 937 - RNA, 20 nt, Artificial Sequence
  synthesized
uggauaccaggccaugugcc

SEQ ID NO: 938 - RNA, 20 nt, Artificial Sequence
  synthesized
cgggccacagcugcuccgga

SEQ ID NO: 939 - RNA, 20 nt, Artificial Sequence
  synthesized
cugccgcagguggcagaugg

SEQ ID NO: 940 - RNA, 20 nt, Artificial Sequence
  synthesized
gccgcagguggcagaugggu

SEQ ID NO: 941 - RNA, 20 nt, Artificial Sequence
  synthesized
ggcgggccacagcugcuccg

SEQ ID NO: 942 - RNA, 20 nt, Artificial Sequence
  synthesized
ugccgcagguggcagauggg

SEQ ID NO: 943 - RNA, 20 nt, Artificial Sequence
  synthesized
aaggugugugucugggggug

SEQ ID NO: 944 - RNA, 20 nt, Artificial Sequence
  synthesized
cccugcccccaggacgucac

SEQ ID NO: 945 - RNA, 20 nt, Artificial Sequence
  synthesized
ccugcccccaggacgucacc

SEQ ID NO: 946 - RNA, 20 nt, Artificial Sequence
  synthesized
cccugaggccaccgcccccu

SEQ ID NO: 947 - RNA, 20 nt, Artificial Sequence
  synthesized
gccgugguugcuggaccugc

SEQ ID NO: 948 - RNA, 20 nt, Artificial Sequence
  synthesized
ucccugaggccaccgccccc

SEQ ID NO: 949 - RNA, 20 nt, Artificial Sequence
  synthesized
ugccgugguugcuggaccug

SEQ ID NO: 950 - RNA, 20 nt, Artificial Sequence
  synthesized
uucccugaggccaccgcccc

SEQ ID NO: 951 - RNA, 20 nt, Artificial Sequence
  synthesized
cuguggccccuccccuggcc

SEQ ID NO: 952 - RNA, 20 nt, Artificial Sequence
  synthesized
gguuuaugcacuggggauga

SEQ ID NO: 953 - RNA, 20 nt, Artificial Sequence
  synthesized
uguggccccuccccuggccc

SEQ ID NO: 954 - RNA, 20 nt, Artificial Sequence
  synthesized
caguggaccccaggcacccc

SEQ ID NO: 955 - RNA, 20 nt, Artificial Sequence
  synthesized
caguucaccccaccuccuca

SEQ ID NO: 956 - RNA, 20 nt, Artificial Sequence
  synthesized
cugcaguggaccccaggcac

SEQ ID NO: 957 - RNA, 20 nt, Artificial Sequence
  synthesized
gcaguggaccccaggcaccc

SEQ ID NO: 958 - RNA, 20 nt, Artificial Sequence
  synthesized
ugcaguggaccccaggcacc

SEQ ID NO: 959 - RNA, 20 nt, Artificial Sequence
  synthesized
agacaucauugaccagggau

SEQ ID NO: 960 - RNA, 20 nt, Artificial Sequence
  synthesized
ccggaauucccucucacugu

SEQ ID NO: 961 - RNA, 20 nt, Artificial Sequence
  synthesized
cggaauucccucucacuguc

SEQ ID NO: 962 - RNA, 20 nt, Artificial Sequence
  synthesized
ggagacaucauugaccaggg

SEQ ID NO: 963 - RNA, 20 nt, Artificial Sequence
  synthesized
uccggaauucccucucacug

SEQ ID NO: 964 - RNA, 20 nt, Artificial Sequence
  synthesized
uuccggaauucccucucacu

SEQ ID NO: 965 - RNA, 20 nt, Artificial Sequence
  synthesized
aagugugguuggugggccag

SEQ ID NO: 966 - RNA, 20 nt, Artificial Sequence
  synthesized
augagcucacaggcagugcc

SEQ ID NO: 967 - RNA, 20 nt, Artificial Sequence
  synthesized
gugugguuggugggccaggg

SEQ ID NO: 968 - RNA, 20 nt, Artificial Sequence
  synthesized
uaaugagcucacaggcagug

SEQ ID NO: 969 - RNA, 20 nt, Artificial Sequence
  synthesized
aucccuuucugacuuagaga

SEQ ID NO: 970 - RNA, 20 nt, Artificial Sequence
  synthesized
cgaucccuuucugacuuaga

SEQ ID NO: 971 - RNA, 20 nt, Artificial Sequence
  synthesized
gggguuuaggaaccagccug

SEQ ID NO: 972 - RNA, 20 nt, Artificial Sequence
  synthesized
ggguuuaggaaccagccugg

SEQ ID NO: 973 - RNA, 20 nt, Artificial Sequence
  synthesized
ucccuuucugacuuagagag

SEQ ID NO: 974 - RNA, 20 nt, Artificial Sequence
  synthesized
caagcuugguucaaugaccu

SEQ ID NO: 975 - RNA, 20 nt, Artificial Sequence
  synthesized
ccaagcuugguucaaugacc

SEQ ID NO: 976 - RNA, 20 nt, Artificial Sequence
  synthesized
cccaagcuugguucaaugac

SEQ ID NO: 977 - RNA, 20 nt, Artificial Sequence
  synthesized
gcccaagcuugguucaauga

SEQ ID NO: 978 - RNA, 20 nt, Artificial Sequence
  synthesized
ucguucauucaugaugaugg

SEQ ID NO: 979 - RNA, 20 nt, Artificial Sequence
  synthesized
uucauucaugaugauggcag

SEQ ID NO: 980 - RNA, 20 nt, Artificial Sequence
  synthesized
ccuugccaacuuugcacuuc

SEQ ID NO: 981 - RNA, 20 nt, Artificial Sequence
  synthesized
cuugccaacuuugcacuuca

SEQ ID NO: 982 - RNA, 20 nt, Artificial Sequence
  synthesized
uugccaacuuugcacuucau

SEQ ID NO: 983 - RNA, 20 nt, Artificial Sequence
  synthesized
aaagcccagugaugaaacuc

SEQ ID NO: 984 - RNA, 20 nt, Artificial Sequence
  synthesized
aagcccagugaugaaacuca

SEQ ID NO: 985 - RNA, 20 nt, Artificial Sequence
  synthesized
cuuuaagggggccuccguau

SEQ ID NO: 986 - RNA, 20 nt, Artificial Sequence
  synthesized
gcuuuaagggggccuccgua

SEQ ID NO: 987 - RNA, 20 nt, Artificial Sequence
  synthesized
uuaagggggccuccguauaa

SEQ ID NO: 988 - RNA, 20 nt, Artificial Sequence
  synthesized
uuuaagggggccuccguaua

SEQ ID NO: 989 - RNA, 20 nt, Artificial Sequence
  synthesized
acccucaccccaagaaaaau

SEQ ID NO: 990 - RNA, 20 nt, Artificial Sequence
  synthesized
cacccucaccccaagaaaaa

SEQ ID NO: 991 - RNA, 20 nt, Artificial Sequence
  synthesized
ccucaccccaagaaaaaucu

SEQ ID NO: 992 - RNA, 20 nt, Artificial Sequence
  synthesized
ggguucacucaggaguagag

SEQ ID NO: 993 - RNA, 20 nt, Artificial Sequence
  synthesized
uucacucaggaguagaggag

SEQ ID NO: 994 - RNA, 20 nt, Artificial Sequence
  synthesized
aucagcacauagcuauccgc

SEQ ID NO: 995 - RNA, 20 nt, Artificial Sequence
  synthesized
ggagaaggccgucuugguug

SEQ ID NO: 996 - RNA, 20 nt, Artificial Sequence
  synthesized
ggaucagcacauagcuaucc

SEQ ID NO: 997 - RNA, 20 nt, Artificial Sequence
  synthesized
ucagcacauagcuauccgcc

SEQ ID NO: 998 - RNA, 20 nt, Artificial Sequence
  synthesized
uggagaaggccgucuugguu

SEQ ID NO: 999 - RNA, 20 nt, Artificial Sequence
  synthesized
caccuccccgucuugucccc

SEQ ID NO: 1000 - RNA, 20 nt, Artificial Sequence
  synthesized
cccaccuccccgucuugucc

SEQ ID NO: 1001 - RNA, 20 nt, Artificial Sequence
  synthesized
ucccaccuccccgucuuguc

SEQ ID NO: 1002 - RNA, 20 nt, Artificial Sequence
  synthesized
cgugagugugacggggacaa

SEQ ID NO: 1003 - RNA, 20 nt, Artificial Sequence
  synthesized
cugcgugagugugacgggga

SEQ ID NO: 1004 - RNA, 20 nt, Artificial Sequence
  synthesized
ugcgugagugugacggggac

SEQ ID NO: 1005 - RNA, 20 nt, Artificial Sequence
  synthesized
accuccccgucuuguccccg

SEQ ID NO: 1006 - RNA, 20 nt, Artificial Sequence
  synthesized
ccccgucuuguccccgucac

SEQ ID NO: 1007 - RNA, 20 nt, Artificial Sequence
  synthesized
cccgucuuguccccgucaca

SEQ ID NO: 1008 - RNA, 20 nt, Artificial Sequence
  synthesized
ccuccccgucuuguccccgu

SEQ ID NO: 1009 - RNA, 20 nt, Artificial Sequence
  synthesized
cgucuuguccccgucacacu

SEQ ID NO: 1010 - RNA, 20 nt, Artificial Sequence
  synthesized
cuccccgucuuguccccguc

SEQ ID NO: 1011 - RNA, 20 nt, Artificial Sequence
  synthesized
cuuguccccgucacacucac

SEQ ID NO: 1012 - RNA, 20 nt, Artificial Sequence
  synthesized
gacggggacaagacggggag

SEQ ID NO: 1013 - RNA, 20 nt, Artificial Sequence
  synthesized
gucuuguccccgucacacuc

SEQ ID NO: 1014 - RNA, 20 nt, Artificial Sequence
  synthesized
gugagugugacggggacaag

SEQ ID NO: 1015 - RNA, 20 nt, Artificial Sequence
  synthesized
uccccgucuuguccccguca

SEQ ID NO: 1016 - RNA, 20 nt, Artificial Sequence
  synthesized
ugugacggggacaagacggg

SEQ ID NO: 1017 - RNA, 20 nt, Artificial Sequence
  synthesized
ucccccucccaccuccccgu

SEQ ID NO: 1018 - RNA, 20 nt, Artificial Sequence
  synthesized
acggcuucugcuuucacauu

SEQ ID NO: 1019 - RNA, 20 nt, Artificial Sequence
  synthesized
cacggcuucugcuuucacau

SEQ ID NO: 1020 - RNA, 20 nt, Artificial Sequence
  synthesized
cggcuucugcuuucacauug

SEQ ID NO: 1021 - RNA, 20 nt, Artificial Sequence
  synthesized
ggcuucugcuuucacauugu

SEQ ID NO: 1022 - RNA, 20 nt, Artificial Sequence
  synthesized
agucaccagagaacaaugug

SEQ ID NO: 1023 - RNA, 20 nt, Artificial Sequence
  synthesized
ucaccagagaacaaugugaa

SEQ ID NO: 1024 - RNA, 20 nt, Artificial Sequence
  synthesized
accagagaacaaugugaaag

SEQ ID NO: 1025 - RNA, 20 nt, Artificial Sequence
  synthesized
agaacaaugugaaagcagaa

SEQ ID NO: 1026 - RNA, 20 nt, Artificial Sequence
  synthesized
agagaacaaugugaaagcag

SEQ ID NO: 1027 - RNA, 20 nt, Artificial Sequence
  synthesized
caccagagaacaaugugaaa

SEQ ID NO: 1028 - RNA, 20 nt, Artificial Sequence
  synthesized
cagagaacaaugugaaagca

SEQ ID NO: 1029 - RNA, 20 nt, Artificial Sequence
  synthesized
cuucugcuuucacauuguuc

SEQ ID NO: 1030 - RNA, 20 nt, Artificial Sequence
  synthesized
cuuucacauuguucucuggu

SEQ ID NO: 1031 - RNA, 20 nt, Artificial Sequence
  synthesized
gaacaaugugaaagcagaag

SEQ ID NO: 1032 - RNA, 20 nt, Artificial Sequence
  synthesized
gagaacaaugugaaagcaga

SEQ ID NO: 1033 - RNA, 20 nt, Artificial Sequence
  synthesized
gcuucugcuuucacauuguu

SEQ ID NO: 1034 - RNA, 20 nt, Artificial Sequence
  synthesized
ugcuuucacauuguucucug

SEQ ID NO: 1035 - RNA, 20 nt, Artificial Sequence
  synthesized
uucugcuuucacauuguucu

SEQ ID NO: 1036 - RNA, 20 nt, Artificial Sequence
  synthesized
uuucacauuguucucuggug

SEQ ID NO: 1037 - RNA, 20 nt, Artificial Sequence
  synthesized
ggggagugggcacggcuucu

SEQ ID NO: 1038 - RNA, 20 nt, Artificial Sequence
  synthesized
aggaucugauccgggagcgc

SEQ ID NO: 1039 - RNA, 20 nt, Artificial Sequence
  synthesized
gaggaucugauccgggagcg

SEQ ID NO: 1040 - RNA, 20 nt, Artificial Sequence
  synthesized
accgcgccugaccuuugcag

SEQ ID NO: 1041 - RNA, 20 nt, Artificial Sequence
  synthesized
caccgcgccugaccuuugca

SEQ ID NO: 1042 - RNA, 20 nt, Artificial Sequence
  synthesized
caggacagggcauugauaau

SEQ ID NO: 1043 - RNA, 20 nt, Artificial Sequence
  synthesized
ccaggacagggcauugauaa

SEQ ID NO: 1044 - RNA, 20 nt, Artificial Sequence
  synthesized
gacaccgcgccugaccuuug

SEQ ID NO: 1045 - RNA, 20 nt, Artificial Sequence
  synthesized
gccaggacagggcauugaua

SEQ ID NO: 1046 - RNA, 20 nt, Artificial Sequence
  synthesized
aaaugguggaugaaaugguu

SEQ ID NO: 1047 - RNA, 20 nt, Artificial Sequence
  synthesized
acaaaugguggaugaaaugg

SEQ ID NO: 1048 - RNA, 20 nt, Artificial Sequence
  synthesized
agcccccguacauaccuuau

SEQ ID NO: 1049 - RNA, 20 nt, Artificial Sequence
  synthesized
gagagcccccguacauaccu

SEQ ID NO: 1050 - RNA, 20 nt, Artificial Sequence
  synthesized
gagcccccguacauaccuua

SEQ ID NO: 1051 - RNA, 20 nt, Artificial Sequence
  synthesized
ccucucuucuuccuguuggu

SEQ ID NO: 1052 - RNA, 20 nt, Artificial Sequence
  synthesized
guuaaaacuauaugcugggc

SEQ ID NO: 1053 - RNA, 20 nt, Artificial Sequence
  synthesized
uccucucuucuuccuguugg

SEQ ID NO: 1054 - RNA, 20 nt, Artificial Sequence
  synthesized
agacccuaaggagaagcaaa

SEQ ID NO: 1055 - RNA, 20 nt, Artificial Sequence
  synthesized
cagacccuaaggagaagcaa

SEQ ID NO: 1056 - RNA, 20 nt, Artificial Sequence
  synthesized
gacccuaaggagaagcaaaa

SEQ ID NO: 1057 - RNA, 20 nt, Artificial Sequence
  synthesized
uugcuucuccuuagggucug

SEQ ID NO: 1058 - RNA, 20 nt, Artificial Sequence
  synthesized
cucucuucuuucauaccuca

SEQ ID NO: 1059 - RNA, 20 nt, Artificial Sequence
  synthesized
ucucucuucuuucauaccuc

SEQ ID NO: 1060 - RNA, 20 nt, Artificial Sequence
  synthesized
ucucuucuuucauaccucaa

SEQ ID NO: 1061 - RNA, 20 nt, Artificial Sequence
  synthesized
ugacagaguaagaaucuguc

SEQ ID NO: 1062 - RNA, 20 nt, Artificial Sequence
  synthesized
aagggacaggaggucuggga

SEQ ID NO: 1063 - RNA, 20 nt, Artificial Sequence
  synthesized
aagggacgggaggucuggga

SEQ ID NO: 1064 - RNA, 20 nt, Artificial Sequence
  synthesized
aauaaauaagggacaggagg

SEQ ID NO: 1065 - RNA, 20 nt, Artificial Sequence
  synthesized
aauaaauaagggacgggagg

SEQ ID NO: 1066 - RNA, 20 nt, Artificial Sequence
  synthesized
aaucuucuuucccagaccuc

SEQ ID NO: 1067 - RNA, 20 nt, Artificial Sequence
  synthesized
accucccgucccuuauuuau

SEQ ID NO: 1068 - RNA, 20 nt, Artificial Sequence
  synthesized
accuccugucccuuauuuau

SEQ ID NO: 1069 - RNA, 20 nt, Artificial Sequence
  synthesized
agaccucccgucccuuauuu

SEQ ID NO: 1070 - RNA, 20 nt, Artificial Sequence
  synthesized
agaccuccugucccuuauuu

SEQ ID NO: 1071 - RNA, 20 nt, Artificial Sequence
  synthesized
aggaggucugggaaagaaga

SEQ ID NO: 1072 - RNA, 20 nt, Artificial Sequence
  synthesized
auaaauaagggacaggaggu

SEQ ID NO: 1073 - RNA, 20 nt, Artificial Sequence
  synthesized
auaaauaagggacgggaggu

SEQ ID NO: 1074 - RNA, 20 nt, Artificial Sequence
  synthesized
auaagggacaggaggucugg

SEQ ID NO: 1075 - RNA, 20 nt, Artificial Sequence
  synthesized
auaagggacgggaggucugg

SEQ ID NO: 1076 - RNA, 20 nt, Artificial Sequence
  synthesized
cagaccucccgucccuuauu

SEQ ID NO: 1077 - RNA, 20 nt, Artificial Sequence
  synthesized
cagaccuccugucccuuauu

SEQ ID NO: 1078 - RNA, 20 nt, Artificial Sequence
  synthesized
ccagaccucccgucccuuau

SEQ ID NO: 1079 - RNA, 20 nt, Artificial Sequence
  synthesized
ccagaccuccugucccuuau

SEQ ID NO: 1080 - RNA, 20 nt, Artificial Sequence
  synthesized
cccagaccucccgucccuua

SEQ ID NO: 1081 - RNA, 20 nt, Artificial Sequence
  synthesized
cccagaccuccugucccuua

SEQ ID NO: 1082 - RNA, 20 nt, Artificial Sequence
  synthesized
cccgucccuuauuuauuccu

SEQ ID NO: 1083 - RNA, 20 nt, Artificial Sequence
  synthesized
ccgucccuuauuuauuccuc

SEQ ID NO: 1084 - RNA, 20 nt, Artificial Sequence
  synthesized
ccucccgucccuuauuuauu

SEQ ID NO: 1085 - RNA, 20 nt, Artificial Sequence
  synthesized
ccuccugucccuuauuuauu

SEQ ID NO: 1086 - RNA, 20 nt, Artificial Sequence
  synthesized
ccugucccuuauuuauuccu

SEQ ID NO: 1087 - RNA, 20 nt, Artificial Sequence
  synthesized
cgucccuuauuuauuccucc

SEQ ID NO: 1088 - RNA, 20 nt, Artificial Sequence
  synthesized
cuccugucccuuauuuauuc

SEQ ID NO: 1089 - RNA, 20 nt, Artificial Sequence
  synthesized
cugucccuuauuuauuccuc

SEQ ID NO: 1090 - RNA, 20 nt, Artificial Sequence
  synthesized
cuucuuucccagaccucccg

SEQ ID NO: 1091 - RNA, 20 nt, Artificial Sequence
  synthesized
cuuucccagaccucccgucc

SEQ ID NO: 1092 - RNA, 20 nt, Artificial Sequence
  synthesized
gaauaaauaagggacaggag

SEQ ID NO: 1093 - RNA, 20 nt, Artificial Sequence
  synthesized
gaauaaauaagggacgggag

SEQ ID NO: 1094 - RNA, 20 nt, Artificial Sequence
  synthesized
gaccucccgucccuuauuua

SEQ ID NO: 1095 - RNA, 20 nt, Artificial Sequence
  synthesized
gaccuccugucccuuauuua

SEQ ID NO: 1096 - RNA, 20 nt, Artificial Sequence
  synthesized
gaggaauaaauaagggacag

SEQ ID NO: 1097 - RNA, 20 nt, Artificial Sequence
  synthesized
gaggaauaaauaagggacgg

SEQ ID NO: 1098 - RNA, 20 nt, Artificial Sequence
  synthesized
ggaauaaauaagggacagga

SEQ ID NO: 1099 - RNA, 20 nt, Artificial Sequence
  synthesized
ggaauaaauaagggacggga

SEQ ID NO: 1100 - RNA, 20 nt, Artificial Sequence
  synthesized
ggacgggaggucugggaaag

SEQ ID NO: 1101 - RNA, 20 nt, Artificial Sequence
  synthesized
gggacgggaggucugggaaa

SEQ ID NO: 1102 - RNA, 20 nt, Artificial Sequence
  synthesized
gggaggucugggaaagaaga

SEQ ID NO: 1103 - RNA, 20 nt, Artificial Sequence
  synthesized
uaagggacgggaggucuggg

SEQ ID NO: 1104 - RNA, 20 nt, Artificial Sequence
  synthesized
ucccagaccucccgucccuu

SEQ ID NO: 1105 - RNA, 20 nt, Artificial Sequence
  synthesized
ucccagaccuccugucccuu

SEQ ID NO: 1106 - RNA, 20 nt, Artificial Sequence
  synthesized
ucuucuuucccagaccuccc

SEQ ID NO: 1107 - RNA, 20 nt, Artificial Sequence
  synthesized
ucuuucccagaccucccguc

SEQ ID NO: 1108 - RNA, 20 nt, Artificial Sequence
  synthesized
ucuuucccagaccuccuguc

SEQ ID NO: 1109 - RNA, 20 nt, Artificial Sequence
  synthesized
ugucccuuauuuauuccucc

SEQ ID NO: 1110 - RNA, 20 nt, Artificial Sequence
  synthesized
uucccagaccucccgucccu

SEQ ID NO: 1111 - RNA, 20 nt, Artificial Sequence
  synthesized
uucccagaccuccugucccu

SEQ ID NO: 1112 - RNA, 20 nt, Artificial Sequence
  synthesized
uucuuucccagaccucccgu

SEQ ID NO: 1113 - RNA, 20 nt, Artificial Sequence
  synthesized
uuucccagaccucccguccc

SEQ ID NO: 1114 - RNA, 20 nt, Artificial Sequence
  synthesized
uuucccagaccuccuguccc

SEQ ID NO: 1115 - RNA, 20 nt, Artificial Sequence
  synthesized
acuccccacagacuccgaga

SEQ ID NO: 1116 - RNA, 20 nt, Artificial Sequence
  synthesized
acucccuacagacuccgaga

SEQ ID NO: 1117 - RNA, 20 nt, Artificial Sequence
  synthesized
agaugucgccacuccccaca

SEQ ID NO: 1118 - RNA, 20 nt, Artificial Sequence
  synthesized
agaugucgccacucccuaca

SEQ ID NO: 1119 - RNA, 20 nt, Artificial Sequence
  synthesized
agggaguggcgacaucugga

SEQ ID NO: 1120 - RNA, 20 nt, Artificial Sequence
  synthesized
agucuguagggaguggcgac

SEQ ID NO: 1121 - RNA, 20 nt, Artificial Sequence
  synthesized
agucuguggggaguggcgac

SEQ ID NO: 1122 - RNA, 20 nt, Artificial Sequence
  synthesized
augucgccacuccccacaga

SEQ ID NO: 1123 - RNA, 20 nt, Artificial Sequence
  synthesized
augucgccacucccuacaga

SEQ ID NO: 1124 - RNA, 20 nt, Artificial Sequence
  synthesized
cacagacuccgagacaccaa

SEQ ID NO: 1125 - RNA, 20 nt, Artificial Sequence
  synthesized
cacuccccacagacuccgag

SEQ ID NO: 1126 - RNA, 20 nt, Artificial Sequence
  synthesized
cacucccuacagacuccgag

SEQ ID NO: 1127 - RNA, 20 nt, Artificial Sequence
  synthesized
ccacuccccacagacuccga

SEQ ID NO: 1128 - RNA, 20 nt, Artificial Sequence
  synthesized
ccacucccuacagacuccga

SEQ ID NO: 1129 - RNA, 20 nt, Artificial Sequence
  synthesized
ccagaugucgccacucccca

SEQ ID NO: 1130 - RNA, 20 nt, Artificial Sequence
  synthesized
ccagaugucgccacucccua

SEQ ID NO: 1131 - RNA, 20 nt, Artificial Sequence
  synthesized
cccacagacuccgagacacc

SEQ ID NO: 1132 - RNA, 20 nt, Artificial Sequence
  synthesized
ccccacagacuccgagacac

SEQ ID NO: 1133 - RNA, 20 nt, Artificial Sequence
  synthesized
cccuacagacuccgagacac

SEQ ID NO: 1134 - RNA, 20 nt, Artificial Sequence
  synthesized
ccuacagacuccgagacacc

SEQ ID NO: 1135 - RNA, 20 nt, Artificial Sequence
  synthesized
cgccacuccccacagacucc

SEQ ID NO: 1136 - RNA, 20 nt, Artificial Sequence
  synthesized
cgccacucccuacagacucc

SEQ ID NO: 1137 - RNA, 20 nt, Artificial Sequence
  synthesized
cggagucuguagggaguggc

SEQ ID NO: 1138 - RNA, 20 nt, Artificial Sequence
  synthesized
cggagucuguggggaguggc

SEQ ID NO: 1139 - RNA, 20 nt, Artificial Sequence
  synthesized
cuccccacagacuccgagac

SEQ ID NO: 1140 - RNA, 20 nt, Artificial Sequence
  synthesized
cucccuacagacuccgagac

SEQ ID NO: 1141 - RNA, 20 nt, Artificial Sequence
  synthesized
cucggagucuguagggagug

SEQ ID NO: 1142 - RNA, 20 nt, Artificial Sequence
  synthesized
cucggagucuguggggagug

SEQ ID NO: 1143 - RNA, 20 nt, Artificial Sequence
  synthesized
gagucuguagggaguggcga

SEQ ID NO: 1144 - RNA, 20 nt, Artificial Sequence
  synthesized
gagucuguggggaguggcga

SEQ ID NO: 1145 - RNA, 20 nt, Artificial Sequence
  synthesized
gaugucgccacuccccacag

SEQ ID NO: 1146 - RNA, 20 nt, Artificial Sequence
  synthesized
gaugucgccacucccuacag

SEQ ID NO: 1147 - RNA, 20 nt, Artificial Sequence
  synthesized
ggagucuguagggaguggcg

SEQ ID NO: 1148 - RNA, 20 nt, Artificial Sequence
  synthesized
ggagucuguggggaguggcg

SEQ ID NO: 1149 - RNA, 20 nt, Artificial Sequence
  synthesized
ggggaguggcgacaucugga

SEQ ID NO: 1150 - RNA, 20 nt, Artificial Sequence
  synthesized
ggugucucggagucuguagg

SEQ ID NO: 1151 - RNA, 20 nt, Artificial Sequence
  synthesized
ggugucucggagucuguggg

SEQ ID NO: 1152 - RNA, 20 nt, Artificial Sequence
  synthesized
guagggaguggcgacaucug

SEQ ID NO: 1153 - RNA, 20 nt, Artificial Sequence
  synthesized
gucgccacuccccacagacu

SEQ ID NO: 1154 - RNA, 20 nt, Artificial Sequence
  synthesized
gucgccacucccuacagacu

SEQ ID NO: 1155 - RNA, 20 nt, Artificial Sequence
  synthesized
gucuguagggaguggcgaca

SEQ ID NO: 1156 - RNA, 20 nt, Artificial Sequence
  synthesized
gucuguggggaguggcgaca

SEQ ID NO: 1157 - RNA, 20 nt, Artificial Sequence
  synthesized
guggggaguggcgacaucug

SEQ ID NO: 1158 - RNA, 20 nt, Artificial Sequence
  synthesized
uacagacuccgagacaccaa

SEQ ID NO: 1159 - RNA, 20 nt, Artificial Sequence
  synthesized
uagggaguggcgacaucugg

SEQ ID NO: 1160 - RNA, 20 nt, Artificial Sequence
  synthesized
uccagaugucgccacucccc

SEQ ID NO: 1161 - RNA, 20 nt, Artificial Sequence
  synthesized
uccagaugucgccacucccu

SEQ ID NO: 1162 - RNA, 20 nt, Artificial Sequence
  synthesized
uggggaguggcgacaucugg

SEQ ID NO: 1163 - RNA, 20 nt, Artificial Sequence
  synthesized
ugucgccacuccccacagac

SEQ ID NO: 1164 - RNA, 20 nt, Artificial Sequence
  synthesized
ugucgccacucccuacagac

SEQ ID NO: 1165 - RNA, 20 nt, Artificial Sequence
  synthesized
ugucucggagucuguaggga

SEQ ID NO: 1166 - RNA, 20 nt, Artificial Sequence
  synthesized
ugucucggagucugugggga

SEQ ID NO: 1167 - RNA, 20 nt, Artificial Sequence
  synthesized
acuacagacgcccgccacca

SEQ ID NO: 1168 - RNA, 20 nt, Artificial Sequence
  synthesized
agacgcccgccaccacaccc

SEQ ID NO: 1169 - RNA, 20 nt, Artificial Sequence
  synthesized
agccgggugugguggcgggc

SEQ ID NO: 1170 - RNA, 20 nt, Artificial Sequence
  synthesized
aguagcugggacuacagacg

SEQ ID NO: 1171 - RNA, 20 nt, Artificial Sequence
  synthesized
aguagcugggacuacaggcg

SEQ ID NO: 1172 - RNA, 20 nt, Artificial Sequence
  synthesized
cgggcgccuguagucccagc

SEQ ID NO: 1173 - RNA, 20 nt, Artificial Sequence
  synthesized
cgggcgucuguagucccagc

SEQ ID NO: 1174 - RNA, 20 nt, Artificial Sequence
  synthesized
gcgggcgccuguagucccag

SEQ ID NO: 1175 - RNA, 20 nt, Artificial Sequence
  synthesized
gggcgccuguagucccagcu

SEQ ID NO: 1176 - RNA, 20 nt, Artificial Sequence
  synthesized
gguggcgggcgucuguaguc

SEQ ID NO: 1177 - RNA, 20 nt, Artificial Sequence
  synthesized
ggugugguggcgggcgucug

SEQ ID NO: 1178 - RNA, 20 nt, Artificial Sequence
  synthesized
guagcugggacuacaggcgc

SEQ ID NO: 1179 - RNA, 20 nt, Artificial Sequence
  synthesized
aggugagagaaucacuagag

SEQ ID NO: 1180 - RNA, 20 nt, Artificial Sequence
  synthesized
cacuugggguggcugaggug

SEQ ID NO: 1181 - RNA, 20 nt, Artificial Sequence
  synthesized
cucucaccucagccacccca

SEQ ID NO: 1182 - RNA, 20 nt, Artificial Sequence
  synthesized
ggcugaggugagagaaucac

SEQ ID NO: 1183 - RNA, 20 nt, Artificial Sequence
  synthesized
gggguggcugaggugagaga

SEQ ID NO: 1184 - RNA, 20 nt, Artificial Sequence
  synthesized
uaggcucuagugauucucuc

SEQ ID NO: 1185 - RNA, 20 nt, Artificial Sequence
  synthesized
ucuagugauucucucaccuc

SEQ ID NO: 1186 - RNA, 20 nt, Artificial Sequence
  synthesized
ugauucucucaccucagcca

SEQ ID NO: 1187 - RNA, 20 nt, Artificial Sequence
  synthesized
aagucucgggccucucaggc

SEQ ID NO: 1188 - RNA, 20 nt, Artificial Sequence
  synthesized
aagucucgggccucucgggc

SEQ ID NO: 1189 - RNA, 20 nt, Artificial Sequence
  synthesized
agcagcccgagaggcccgag

SEQ ID NO: 1190 - RNA, 20 nt, Artificial Sequence
  synthesized
agcagccugagaggcccgag

SEQ ID NO: 1191 - RNA, 20 nt, Artificial Sequence
  synthesized
agcccgagaggcccgagacu

SEQ ID NO: 1192 - RNA, 20 nt, Artificial Sequence
  synthesized
agccugagaggcccgagacu

SEQ ID NO: 1193 - RNA, 20 nt, Artificial Sequence
  synthesized
aggcugcuggaaaagaccag

SEQ ID NO: 1194 - RNA, 20 nt, Artificial Sequence
  synthesized
agucucgggccucucaggcu

SEQ ID NO: 1195 - RNA, 20 nt, Artificial Sequence
  synthesized
agucucgggccucucgggcu

SEQ ID NO: 1196 - RNA, 20 nt, Artificial Sequence
  synthesized
cagcagcccgagaggcccga

SEQ ID NO: 1197 - RNA, 20 nt, Artificial Sequence
  synthesized
cagcagccugagaggcccga

SEQ ID NO: 1198 - RNA, 20 nt, Artificial Sequence
  synthesized
cagcccgagaggcccgagac

SEQ ID NO: 1199 - RNA, 20 nt, Artificial Sequence
  synthesized
cagccugagaggcccgagac

SEQ ID NO: 1200 - RNA, 20 nt, Artificial Sequence
  synthesized
caggcugcuggaaaagacca

SEQ ID NO: 1201 - RNA, 20 nt, Artificial Sequence
  synthesized
ccagcagcccgagaggcccg

SEQ ID NO: 1202 - RNA, 20 nt, Artificial Sequence
  synthesized
ccagcagccugagaggcccg

SEQ ID NO: 1203 - RNA, 20 nt, Artificial Sequence
  synthesized
cccgagaggcccgagacuuc

SEQ ID NO: 1204 - RNA, 20 nt, Artificial Sequence
  synthesized
ccgagaggcccgagacuucc

SEQ ID NO: 1205 - RNA, 20 nt, Artificial Sequence
  synthesized
ccucucaggcugcuggaaaa

SEQ ID NO: 1206 - RNA, 20 nt, Artificial Sequence
  synthesized
ccucucgggcugcuggaaaa

SEQ ID NO: 1207 - RNA, 20 nt, Artificial Sequence
  synthesized
ccugagaggcccgagacuuc

SEQ ID NO: 1208 - RNA, 20 nt, Artificial Sequence
  synthesized
cgagaggcccgagacuuccc

SEQ ID NO: 1209 - RNA, 20 nt, Artificial Sequence
  synthesized
cgggccucucgggcugcugg

SEQ ID NO: 1210 - RNA, 20 nt, Artificial Sequence
  synthesized
cgggcugcuggaaaagacca

SEQ ID NO: 1211 - RNA, 20 nt, Artificial Sequence
  synthesized
cucaggcugcuggaaaagac

SEQ ID NO: 1212 - RNA, 20 nt, Artificial Sequence
  synthesized
cucgggccucucaggcugcu

SEQ ID NO: 1213 - RNA, 20 nt, Artificial Sequence
  synthesized
cucgggccucucgggcugcu

SEQ ID NO: 1214 - RNA, 20 nt, Artificial Sequence
  synthesized
cucgggcugcuggaaaagac

SEQ ID NO: 1215 - RNA, 20 nt, Artificial Sequence
  synthesized
cucucaggcugcuggaaaag

SEQ ID NO: 1216 - RNA, 20 nt, Artificial Sequence
  synthesized
cucucgggcugcuggaaaag

SEQ ID NO: 1217 - RNA, 20 nt, Artificial Sequence
  synthesized
cugagaggcccgagacuucc

SEQ ID NO: 1218 - RNA, 20 nt, Artificial Sequence
  synthesized
gaagucucgggccucucagg

SEQ ID NO: 1219 - RNA, 20 nt, Artificial Sequence
  synthesized
gaagucucgggccucucggg

SEQ ID NO: 1220 - RNA, 20 nt, Artificial Sequence
  synthesized
gcagcccgagaggcccgaga

SEQ ID NO: 1221 - RNA, 20 nt, Artificial Sequence
  synthesized
gcagccugagaggcccgaga

SEQ ID NO: 1222 - RNA, 20 nt, Artificial Sequence
  synthesized
gcccgagaggcccgagacuu

SEQ ID NO: 1223 - RNA, 20 nt, Artificial Sequence
  synthesized
gccucucaggcugcuggaaa

SEQ ID NO: 1224 - RNA, 20 nt, Artificial Sequence
  synthesized
gccucucgggcugcuggaaa

SEQ ID NO: 1225 - RNA, 20 nt, Artificial Sequence
  synthesized
gccugagaggcccgagacuu

SEQ ID NO: 1226 - RNA, 20 nt, Artificial Sequence
  synthesized
ggaagucucgggccucucag

SEQ ID NO: 1227 - RNA, 20 nt, Artificial Sequence
  synthesized
ggaagucucgggccucucgg

SEQ ID NO: 1228 - RNA, 20 nt, Artificial Sequence
  synthesized
ggccucucaggcugcuggaa

SEQ ID NO: 1229 - RNA, 20 nt, Artificial Sequence
  synthesized
ggccucucgggcugcuggaa

SEQ ID NO: 1230 - RNA, 20 nt, Artificial Sequence
  synthesized
gggaagucucgggccucuca

SEQ ID NO: 1231 - RNA, 20 nt, Artificial Sequence
  synthesized
gggaagucucgggccucucg

SEQ ID NO: 1232 - RNA, 20 nt, Artificial Sequence
  synthesized
gggccucucgggcugcugga

SEQ ID NO: 1233 - RNA, 20 nt, Artificial Sequence
  synthesized
gggcugcuggaaaagaccag

SEQ ID NO: 1234 - RNA, 20 nt, Artificial Sequence
  synthesized
gucucgggccucucaggcug

SEQ ID NO: 1235 - RNA, 20 nt, Artificial Sequence
  synthesized
gucucgggccucucgggcug

SEQ ID NO: 1236 - RNA, 20 nt, Artificial Sequence
  synthesized
ucaggcugcuggaaaagacc

SEQ ID NO: 1237 - RNA, 20 nt, Artificial Sequence
  synthesized
uccagcagcccgagaggccc

SEQ ID NO: 1238 - RNA, 20 nt, Artificial Sequence
  synthesized
uccagcagccugagaggccc

SEQ ID NO: 1239 - RNA, 20 nt, Artificial Sequence
  synthesized
ucgggccucucaggcugcug

SEQ ID NO: 1240 - RNA, 20 nt, Artificial Sequence
  synthesized
ucgggccucucgggcugcug

SEQ ID NO: 1241 - RNA, 20 nt, Artificial Sequence
  synthesized
ucgggcugcuggaaaagacc

SEQ ID NO: 1242 - RNA, 20 nt, Artificial Sequence
  synthesized
ucucaggcugcuggaaaaga

SEQ ID NO: 1243 - RNA, 20 nt, Artificial Sequence
  synthesized
ucucgggccucucaggcugc

SEQ ID NO: 1244 - RNA, 20 nt, Artificial Sequence
  synthesized
ucucgggccucucgggcugc

SEQ ID NO: 1245 - RNA, 20 nt, Artificial Sequence
  synthesized
ucucgggcugcuggaaaaga

SEQ ID NO: 1246 - RNA, 20 nt, Artificial Sequence
  synthesized
ugagaggcccgagacuuccc

SEQ ID NO: 1247 - RNA, 20 nt, Artificial Sequence
  synthesized
uuccagcagcccgagaggcc

SEQ ID NO: 1248 - RNA, 20 nt, Artificial Sequence
  synthesized
uuccagcagccugagaggcc

SEQ ID NO: 1249 - RNA, 20 nt, Artificial Sequence
  synthesized
uuuccagcagcccgagaggc

SEQ ID NO: 1250 - RNA, 20 nt, Artificial Sequence
  synthesized
uuuccagcagccugagaggc

SEQ ID NO: 1251 - RNA, 20 nt, Artificial Sequence
  synthesized
aauaaugccggaacauugcc

SEQ ID NO: 1252 - RNA, 20 nt, Artificial Sequence
  synthesized
aaugccggaacauugccgag

SEQ ID NO: 1253 - RNA, 20 nt, Artificial Sequence
  synthesized
aaugcuggaacauugccgag

SEQ ID NO: 1254 - RNA, 20 nt, Artificial Sequence
  synthesized
aauguuccggcauuauuuca

SEQ ID NO: 1255 - RNA, 20 nt, Artificial Sequence
  synthesized
acgucucggcaauguuccag

SEQ ID NO: 1256 - RNA, 20 nt, Artificial Sequence
  synthesized
acgucucggcaauguuccgg

SEQ ID NO: 1257 - RNA, 20 nt, Artificial Sequence
  synthesized
agauuugaaauaaugccgga

SEQ ID NO: 1258 - RNA, 20 nt, Artificial Sequence
  synthesized
augccggaacauugccgaga

SEQ ID NO: 1259 - RNA, 20 nt, Artificial Sequence
  synthesized
augcuggaacauugccgaga

SEQ ID NO: 1260 - RNA, 20 nt, Artificial Sequence
  synthesized
auguuccggcauuauuucaa

SEQ ID NO: 1261 - RNA, 20 nt, Artificial Sequence
  synthesized
auuugaaauaaugccggaac

SEQ ID NO: 1262 - RNA, 20 nt, Artificial Sequence
  synthesized
caauguuccggcauuauuuc

SEQ ID NO: 1263 - RNA, 20 nt, Artificial Sequence
  synthesized
ccggaacauugccgagacgu

SEQ ID NO: 1264 - RNA, 20 nt, Artificial Sequence
  synthesized
ccggcauuauuucaaaucua

SEQ ID NO: 1265 - RNA, 20 nt, Artificial Sequence
  synthesized
cggaacauugccgagacgua

SEQ ID NO: 1266 - RNA, 20 nt, Artificial Sequence
  synthesized
cggcaauguuccagcauuau

SEQ ID NO: 1267 - RNA, 20 nt, Artificial Sequence
  synthesized
cggcaauguuccggcauuau

SEQ ID NO: 1268 - RNA, 20 nt, Artificial Sequence
  synthesized
cgucucggcaauguuccagc

SEQ ID NO: 1269 - RNA, 20 nt, Artificial Sequence
  synthesized
cgucucggcaauguuccggc

SEQ ID NO: 1270 - RNA, 20 nt, Artificial Sequence
  synthesized
cucggcaauguuccagcauu

SEQ ID NO: 1271 - RNA, 20 nt, Artificial Sequence
  synthesized
cucggcaauguuccggcauu

SEQ ID NO: 1272 - RNA, 20 nt, Artificial Sequence
  synthesized
cuggaacauugccgagacgu

SEQ ID NO: 1273 - RNA, 20 nt, Artificial Sequence
  synthesized
gaaauaaugccggaacauug

SEQ ID NO: 1274 - RNA, 20 nt, Artificial Sequence
  synthesized
gaaauaaugcuggaacauug

SEQ ID NO: 1275 - RNA, 20 nt, Artificial Sequence
  synthesized
gauuugaaauaaugccggaa

SEQ ID NO: 1276 - RNA, 20 nt, Artificial Sequence
  synthesized
gcaauguuccggcauuauuu

SEQ ID NO: 1277 - RNA, 20 nt, Artificial Sequence
  synthesized
gccggaacauugccgagacg

SEQ ID NO: 1278 - RNA, 20 nt, Artificial Sequence
  synthesized
gcuggaacauugccgagacg

SEQ ID NO: 1279 - RNA, 20 nt, Artificial Sequence
  synthesized
gucucggcaauguuccagca

SEQ ID NO: 1280 - RNA, 20 nt, Artificial Sequence
  synthesized
gucucggcaauguuccggca

SEQ ID NO: 1281 - RNA, 20 nt, Artificial Sequence
  synthesized
guuccggcauuauuucaaau

SEQ ID NO: 1282 - RNA, 20 nt, Artificial Sequence
  synthesized
uaaugccggaacauugccga

SEQ ID NO: 1283 - RNA, 20 nt, Artificial Sequence
  synthesized
uaaugcuggaacauugccga

SEQ ID NO: 1284 - RNA, 20 nt, Artificial Sequence
  synthesized
uacgucucggcaauguucca

SEQ ID NO: 1285 - RNA, 20 nt, Artificial Sequence
  synthesized
uacgucucggcaauguuccg

SEQ ID NO: 1286 - RNA, 20 nt, Artificial Sequence
  synthesized
uagauuugaaauaaugccgg

SEQ ID NO: 1287 - RNA, 20 nt, Artificial Sequence
  synthesized
ucggcaauguuccagcauua

SEQ ID NO: 1288 - RNA, 20 nt, Artificial Sequence
  synthesized
ucggcaauguuccggcauua

SEQ ID NO: 1289 - RNA, 20 nt, Artificial Sequence
  synthesized
ucucggcaauguuccggcau

SEQ ID NO: 1290 - RNA, 20 nt, Artificial Sequence
  synthesized
ugaaauaaugccggaacauu

SEQ ID NO: 1291 - RNA, 20 nt, Artificial Sequence
  synthesized
ugccggaacauugccgagac

SEQ ID NO: 1292 - RNA, 20 nt, Artificial Sequence
  synthesized
ugcuggaacauugccgagac

SEQ ID NO: 1293 - RNA, 20 nt, Artificial Sequence
  synthesized
uggaacauugccgagacgua

SEQ ID NO: 1294 - RNA, 20 nt, Artificial Sequence
  synthesized
uuccggcauuauuucaaauc

SEQ ID NO: 1295 - RNA, 20 nt, Artificial Sequence
  synthesized
uugaaauaaugccggaacau

SEQ ID NO: 1296 - RNA, 20 nt, Artificial Sequence
  synthesized
uuugaaauaaugccggaaca

SEQ ID NO: 1297 - RNA, 20 nt, Artificial Sequence
  synthesized
aacaacugaccucugggaac

SEQ ID NO: 1298 - RNA, 20 nt, Artificial Sequence
  synthesized
acaacugaccucugggaacc

SEQ ID NO: 1299 - RNA, 20 nt, Artificial Sequence
  synthesized
acuagcugagaacaacugac

SEQ ID NO: 1300 - RNA, 20 nt, Artificial Sequence
  synthesized
acuagcugagaucaacugac

SEQ ID NO: 1301 - RNA, 20 nt, Artificial Sequence
  synthesized
agaacaacugaccucuggga

SEQ ID NO: 1302 - RNA, 20 nt, Artificial Sequence
  synthesized
agaggucaguugaucucagc

SEQ ID NO: 1303 - RNA, 20 nt, Artificial Sequence
  synthesized
agaggucaguuguucucagc

SEQ ID NO: 1304 - RNA, 20 nt, Artificial Sequence
  synthesized
agaucaacugaccucuggga

SEQ ID NO: 1305 - RNA, 20 nt, Artificial Sequence
  synthesized
aggucaguugaucucagcua

SEQ ID NO: 1306 - RNA, 20 nt, Artificial Sequence
  synthesized
aggucaguuguucucagcua

SEQ ID NO: 1307 - RNA, 20 nt, Artificial Sequence
  synthesized
aucaacugaccucugggaac

SEQ ID NO: 1308 - RNA, 20 nt, Artificial Sequence
  synthesized
auuacuagcugagaucaacu

SEQ ID NO: 1309 - RNA, 20 nt, Artificial Sequence
  synthesized
caauuacuagcugagaucaa

SEQ ID NO: 1310 - RNA, 20 nt, Artificial Sequence
  synthesized
cagaggucaguugaucucag

SEQ ID NO: 1311 - RNA, 20 nt, Artificial Sequence
  synthesized
cagaggucaguuguucucag

SEQ ID NO: 1312 - RNA, 20 nt, Artificial Sequence
  synthesized
caguugaucucagcuaguaa

SEQ ID NO: 1313 - RNA, 20 nt, Artificial Sequence
  synthesized
cccagaggucaguugaucuc

SEQ ID NO: 1314 - RNA, 20 nt, Artificial Sequence
  synthesized
cccagaggucaguuguucuc

SEQ ID NO: 1315 - RNA, 20 nt, Artificial Sequence
  synthesized
cuagcugagaacaacugacc

SEQ ID NO: 1316 - RNA, 20 nt, Artificial Sequence
  synthesized
cuagcugagaucaacugacc

SEQ ID NO: 1317 - RNA, 20 nt, Artificial Sequence
  synthesized
gaacaacugaccucugggaa

SEQ ID NO: 1318 - RNA, 20 nt, Artificial Sequence
  synthesized
gagaacaacugaccucuggg

SEQ ID NO: 1319 - RNA, 20 nt, Artificial Sequence
  synthesized
gagaucaacugaccucuggg

SEQ ID NO: 1320 - RNA, 20 nt, Artificial Sequence
  synthesized
gaggucaguugaucucagcu

SEQ ID NO: 1321 - RNA, 20 nt, Artificial Sequence
  synthesized
gaggucaguuguucucagcu

SEQ ID NO: 1322 - RNA, 20 nt, Artificial Sequence
  synthesized
gaucaacugaccucugggaa

SEQ ID NO: 1323 - RNA, 20 nt, Artificial Sequence
  synthesized
ggucaguugaucucagcuag

SEQ ID NO: 1324 - RNA, 20 nt, Artificial Sequence
  synthesized
gguucccagaggucaguuga

SEQ ID NO: 1325 - RNA, 20 nt, Artificial Sequence
  synthesized
gguucccagaggucaguugu

SEQ ID NO: 1326 - RNA, 20 nt, Artificial Sequence
  synthesized
gucaauuacuagcugagaac

SEQ ID NO: 1327 - RNA, 20 nt, Artificial Sequence
  synthesized
gucaauuacuagcugagauc

SEQ ID NO: 1328 - RNA, 20 nt, Artificial Sequence
  synthesized
gucaguugaucucagcuagu

SEQ ID NO: 1329 - RNA, 20 nt, Artificial Sequence
  synthesized
guucccagaggucaguugau

SEQ ID NO: 1330 - RNA, 20 nt, Artificial Sequence
  synthesized
guucccagaggucaguuguu

SEQ ID NO: 1331 - RNA, 20 nt, Artificial Sequence
  synthesized
guugaucucagcuaguaauu

SEQ ID NO: 1332 - RNA, 20 nt, Artificial Sequence
  synthesized
uacuagcugagaacaacuga

SEQ ID NO: 1333 - RNA, 20 nt, Artificial Sequence
  synthesized
uacuagcugagaucaacuga

SEQ ID NO: 1334 - RNA, 20 nt, Artificial Sequence
  synthesized
uagcugagaacaacugaccu

SEQ ID NO: 1335 - RNA, 20 nt, Artificial Sequence
  synthesized
uagcugagaucaacugaccu

SEQ ID NO: 1336 - RNA, 20 nt, Artificial Sequence
  synthesized
ucaacugaccucugggaacc

SEQ ID NO: 1337 - RNA, 20 nt, Artificial Sequence
  synthesized
ucccagaggucaguugaucu

SEQ ID NO: 1338 - RNA, 20 nt, Artificial Sequence
  synthesized
ucccagaggucaguuguucu

SEQ ID NO: 1339 - RNA, 20 nt, Artificial Sequence
  synthesized
ugagaacaacugaccucugg

SEQ ID NO: 1340 - RNA, 20 nt, Artificial Sequence
  synthesized
ugagaucaacugaccucugg

SEQ ID NO: 1341 - RNA, 20 nt, Artificial Sequence
  synthesized
ugucaauuacuagcugagau

SEQ ID NO: 1342 - RNA, 20 nt, Artificial Sequence
  synthesized
uuacuagcugagaacaacug

SEQ ID NO: 1343 - RNA, 20 nt, Artificial Sequence
  synthesized
uuacuagcugagaucaacug

SEQ ID NO: 1344 - RNA, 20 nt, Artificial Sequence
  synthesized
uucccagaggucaguugauc

SEQ ID NO: 1345 - RNA, 20 nt, Artificial Sequence
  synthesized
uugaucucagcuaguaauug

SEQ ID NO: 1346 - RNA, 20 nt, Artificial Sequence
  synthesized
uuguucucagcuaguaauug

SEQ ID NO: 1347 - RNA, 20 nt, Artificial Sequence
  synthesized
aaaaaaucuuggugucucgg

SEQ ID NO: 1348 - RNA, 20 nt, Artificial Sequence
  synthesized
aaaaaucuuggugucucgga

SEQ ID NO: 1349 - RNA, 20 nt, Artificial Sequence
  synthesized
agaaaaucuuggugucucgg

SEQ ID NO: 1350 - RNA, 20 nt, Artificial Sequence
  synthesized
auguucagaaaaucuuggug

SEQ ID NO: 1351 - RNA, 20 nt, Artificial Sequence
  synthesized
caaaaaaucuuggugucucg

SEQ ID NO: 1352 - RNA, 20 nt, Artificial Sequence
  synthesized
cagaaaaucuuggugucucg

SEQ ID NO: 1353 - RNA, 20 nt, Artificial Sequence
  synthesized
gaaaaucuuggugucucgga

SEQ ID NO: 1354 - RNA, 20 nt, Artificial Sequence
  synthesized
gaauguucagaaaaucuugg

SEQ ID NO: 1355 - RNA, 20 nt, Artificial Sequence
  synthesized
ggaauguucagaaaaucuug

SEQ ID NO: 1356 - RNA, 20 nt, Artificial Sequence
  synthesized
guucaaaaaaucuugguguc

SEQ ID NO: 1357 - RNA, 20 nt, Artificial Sequence
  synthesized
guucagaaaaucuugguguc

SEQ ID NO: 1358 - RNA, 20 nt, Artificial Sequence
  synthesized
uguucagaaaaucuuggugu

SEQ ID NO: 1359 - RNA, 20 nt, Artificial Sequence
  synthesized
aaggaaccggcucagcccug

SEQ ID NO: 1360 - RNA, 20 nt, Artificial Sequence
  synthesized
aaggugggaaggaaccggcu

SEQ ID NO: 1361 - RNA, 20 nt, Artificial Sequence
  synthesized
acuggcucagcccugcccac

SEQ ID NO: 1362 - RNA, 20 nt, Artificial Sequence
  synthesized
agccaguuccuucccaccuu

SEQ ID NO: 1363 - RNA, 20 nt, Artificial Sequence
  synthesized
agccgguuccuucccaccuu

SEQ ID NO: 1364 - RNA, 20 nt, Artificial Sequence
  synthesized
aggaaccggcucagcccugc

SEQ ID NO: 1365 - RNA, 20 nt, Artificial Sequence
  synthesized
aggaacuggcucagcccugc

SEQ ID NO: 1366 - RNA, 20 nt, Artificial Sequence
  synthesized
agggcugagccaguuccuuc

SEQ ID NO: 1367 - RNA, 20 nt, Artificial Sequence
  synthesized
agggcugagccgguuccuuc

SEQ ID NO: 1368 - RNA, 20 nt, Artificial Sequence
  synthesized
aggugggaaggaaccggcuc

SEQ ID NO: 1369 - RNA, 20 nt, Artificial Sequence
  synthesized
agugaaggugggaaggaacc

SEQ ID NO: 1370 - RNA, 20 nt, Artificial Sequence
  synthesized
agugaaggugggaaggaacu

SEQ ID NO: 1371 - RNA, 20 nt, Artificial Sequence
  synthesized
agugggcagggcugagccag

SEQ ID NO: 1372 - RNA, 20 nt, Artificial Sequence
  synthesized
agugggcagggcugagccgg

SEQ ID NO: 1373 - RNA, 20 nt, Artificial Sequence
  synthesized
aguuccuucccaccuucacu

SEQ ID NO: 1374 - RNA, 20 nt, Artificial Sequence
  synthesized
cagggcugagccaguuccuu

SEQ ID NO: 1375 - RNA, 20 nt, Artificial Sequence
  synthesized
cagggcugagccgguuccuu

SEQ ID NO: 1376 - RNA, 20 nt, Artificial Sequence
  synthesized
cggcucagcccugcccacuc

SEQ ID NO: 1377 - RNA, 20 nt, Artificial Sequence
  synthesized
cgguuccuucccaccuucac

SEQ ID NO: 1378 - RNA, 20 nt, Artificial Sequence
  synthesized
cugagccgguuccuucccac

SEQ ID NO: 1379 - RNA, 20 nt, Artificial Sequence
  synthesized
cugagugaaggugggaagga

SEQ ID NO: 1380 - RNA, 20 nt, Artificial Sequence
  synthesized
gaaccggcucagcccugccc

SEQ ID NO: 1381 - RNA, 20 nt, Artificial Sequence
  synthesized
gaaggaacuggcucagcccu

SEQ ID NO: 1382 - RNA, 20 nt, Artificial Sequence
  synthesized
gaaggugggaaggaaccggc

SEQ ID NO: 1383 - RNA, 20 nt, Artificial Sequence
  synthesized
gagccaguuccuucccaccu

SEQ ID NO: 1384 - RNA, 20 nt, Artificial Sequence
  synthesized
gagccgguuccuucccaccu

SEQ ID NO: 1385 - RNA, 20 nt, Artificial Sequence
  synthesized
gagugggcagggcugagccg

SEQ ID NO: 1386 - RNA, 20 nt, Artificial Sequence
  synthesized
gccgguuccuucccaccuuc

SEQ ID NO: 1387 - RNA, 20 nt, Artificial Sequence
  synthesized
gcugagccgguuccuuccca

SEQ ID NO: 1388 - RNA, 20 nt, Artificial Sequence
  synthesized
ggaaccggcucagcccugcc

SEQ ID NO: 1389 - RNA, 20 nt, Artificial Sequence
  synthesized
ggaacuggcucagcccugcc

SEQ ID NO: 1390 - RNA, 20 nt, Artificial Sequence
  synthesized
ggaaggaaccggcucagccc

SEQ ID NO: 1391 - RNA, 20 nt, Artificial Sequence
  synthesized
ggaaggaacuggcucagccc

SEQ ID NO: 1392 - RNA, 20 nt, Artificial Sequence
  synthesized
ggcagggcugagccaguucc

SEQ ID NO: 1393 - RNA, 20 nt, Artificial Sequence
  synthesized
ggcagggcugagccgguucc

SEQ ID NO: 1394 - RNA, 20 nt, Artificial Sequence
  synthesized
ggcugagccgguuccuuccc

SEQ ID NO: 1395 - RNA, 20 nt, Artificial Sequence
  synthesized
gggaaggaaccggcucagcc

SEQ ID NO: 1396 - RNA, 20 nt, Artificial Sequence
  synthesized
gggaaggaacuggcucagcc

SEQ ID NO: 1397 - RNA, 20 nt, Artificial Sequence
  synthesized
gggcagggcugagccaguuc

SEQ ID NO: 1398 - RNA, 20 nt, Artificial Sequence
  synthesized
gggcugagccaguuccuucc

SEQ ID NO: 1399 - RNA, 20 nt, Artificial Sequence
  synthesized
gggcugagccgguuccuucc

SEQ ID NO: 1400 - RNA, 20 nt, Artificial Sequence
  synthesized
ggugggaaggaaccggcuca

SEQ ID NO: 1401 - RNA, 20 nt, Artificial Sequence
  synthesized
ggugggaaggaacuggcuca

SEQ ID NO: 1402 - RNA, 20 nt, Artificial Sequence
  synthesized
gguuccuucccaccuucacu

SEQ ID NO: 1403 - RNA, 20 nt, Artificial Sequence
  synthesized
gugaaggugggaaggaaccg

SEQ ID NO: 1404 - RNA, 20 nt, Artificial Sequence
  synthesized
gugaaggugggaaggaacug

SEQ ID NO: 1405 - RNA, 20 nt, Artificial Sequence
  synthesized
gugggaaggaaccggcucag

SEQ ID NO: 1406 - RNA, 20 nt, Artificial Sequence
  synthesized
gugggaaggaacuggcucag

SEQ ID NO: 1407 - RNA, 20 nt, Artificial Sequence
  synthesized
gugggcagggcugagccagu

SEQ ID NO: 1408 - RNA, 20 nt, Artificial Sequence
  synthesized
gugggcagggcugagccggu

SEQ ID NO: 1409 - RNA, 20 nt, Artificial Sequence
  synthesized
ugagccaguuccuucccacc

SEQ ID NO: 1410 - RNA, 20 nt, Artificial Sequence
  synthesized
ugagccgguuccuucccacc

SEQ ID NO: 1411 - RNA, 20 nt, Artificial Sequence
  synthesized
uggcucagcccugcccacuc

SEQ ID NO: 1412 - RNA, 20 nt, Artificial Sequence
  synthesized
ugggaaggaaccggcucagc

SEQ ID NO: 1413 - RNA, 20 nt, Artificial Sequence
  synthesized
ugggaaggaacuggcucagc

SEQ ID NO: 1414 - RNA, 20 nt, Artificial Sequence
  synthesized
ugggcagggcugagccgguu

SEQ ID NO: 1415 - RNA, 20 nt, Artificial Sequence
  synthesized
cucuuaaaaauuucugcucc

SEQ ID NO: 1416 - RNA, 20 nt, Artificial Sequence
  synthesized
acccucaagcaguccagaaa

SEQ ID NO: 1417 - RNA, 20 nt, Artificial Sequence
  synthesized
acccucgagcaguccagaaa

SEQ ID NO: 1418 - RNA, 20 nt, Artificial Sequence
  synthesized
acugacccucaagcagucca

SEQ ID NO: 1419 - RNA, 20 nt, Artificial Sequence
  synthesized
acugacccucgagcagucca

SEQ ID NO: 1420 - RNA, 20 nt, Artificial Sequence
  synthesized
acugcucgagggucaguuau

SEQ ID NO: 1421 - RNA, 20 nt, Artificial Sequence
  synthesized
acugcuugagggucaguuau

SEQ ID NO: 1422 - RNA, 20 nt, Artificial Sequence
  synthesized
auaacugacccucaagcagu

SEQ ID NO: 1423 - RNA, 20 nt, Artificial Sequence
  synthesized
auaacugacccucgagcagu

SEQ ID NO: 1424 - RNA, 20 nt, Artificial Sequence
  synthesized
auauaacugacccucaagca

SEQ ID NO: 1425 - RNA, 20 nt, Artificial Sequence
  synthesized
auauaacugacccucgagca

SEQ ID NO: 1426 - RNA, 20 nt, Artificial Sequence
  synthesized
caagcaguccagaaaaaaua

SEQ ID NO: 1427 - RNA, 20 nt, Artificial Sequence
  synthesized
cccucaagcaguccagaaaa

SEQ ID NO: 1428 - RNA, 20 nt, Artificial Sequence
  synthesized
cccucgagcaguccagaaaa

SEQ ID NO: 1429 - RNA, 20 nt, Artificial Sequence
  synthesized
ccucaagcaguccagaaaaa

SEQ ID NO: 1430 - RNA, 20 nt, Artificial Sequence
  synthesized
ccucgagcaguccagaaaaa

SEQ ID NO: 1431 - RNA, 20 nt, Artificial Sequence
  synthesized
cgagcaguccagaaaaaaua

SEQ ID NO: 1432 - RNA, 20 nt, Artificial Sequence
  synthesized
cgagggucaguuauauacau

SEQ ID NO: 1433 - RNA, 20 nt, Artificial Sequence
  synthesized
cucaagcaguccagaaaaaa

SEQ ID NO: 1434 - RNA, 20 nt, Artificial Sequence
  synthesized
cucgagcaguccagaaaaaa

SEQ ID NO: 1435 - RNA, 20 nt, Artificial Sequence
  synthesized
cucgagggucaguuauauac

SEQ ID NO: 1436 - RNA, 20 nt, Artificial Sequence
  synthesized
cugacccucaagcaguccag

SEQ ID NO: 1437 - RNA, 20 nt, Artificial Sequence
  synthesized
cugacccucgagcaguccag

SEQ ID NO: 1438 - RNA, 20 nt, Artificial Sequence
  synthesized
cugcucgagggucaguuaua

SEQ ID NO: 1439 - RNA, 20 nt, Artificial Sequence
  synthesized
cugcuugagggucaguuaua

SEQ ID NO: 1440 - RNA, 20 nt, Artificial Sequence
  synthesized
cuggacugcucgagggucag

SEQ ID NO: 1441 - RNA, 20 nt, Artificial Sequence
  synthesized
cuggacugcuugagggucag

SEQ ID NO: 1442 - RNA, 20 nt, Artificial Sequence
  synthesized
cuugagggucaguuauauac

SEQ ID NO: 1443 - RNA, 20 nt, Artificial Sequence
  synthesized
gacccucgagcaguccagaa

SEQ ID NO: 1444 - RNA, 20 nt, Artificial Sequence
  synthesized
gacugcucgagggucaguua

SEQ ID NO: 1445 - RNA, 20 nt, Artificial Sequence
  synthesized
gacugcuugagggucaguua

SEQ ID NO: 1446 - RNA, 20 nt, Artificial Sequence
  synthesized
gagcaguccagaaaaaauau

SEQ ID NO: 1447 - RNA, 20 nt, Artificial Sequence
  synthesized
gcucgagggucaguuauaua

SEQ ID NO: 1448 - RNA, 20 nt, Artificial Sequence
  synthesized
gcuugagggucaguuauaua

SEQ ID NO: 1449 - RNA, 20 nt, Artificial Sequence
  synthesized
ggacugcucgagggucaguu

SEQ ID NO: 1450 - RNA, 20 nt, Artificial Sequence
  synthesized
ggacugcuugagggucaguu

SEQ ID NO: 1451 - RNA, 20 nt, Artificial Sequence
  synthesized
guauauaacugacccucaag

SEQ ID NO: 1452 - RNA, 20 nt, Artificial Sequence
  synthesized
guauauaacugacccucgag

SEQ ID NO: 1453 - RNA, 20 nt, Artificial Sequence
  synthesized
uaacugacccucaagcaguc

SEQ ID NO: 1454 - RNA, 20 nt, Artificial Sequence
  synthesized
uaacugacccucgagcaguc

SEQ ID NO: 1455 - RNA, 20 nt, Artificial Sequence
  synthesized
uauaacugacccucaagcag

SEQ ID NO: 1456 - RNA, 20 nt, Artificial Sequence
  synthesized
uauaacugacccucgagcag

SEQ ID NO: 1457 - RNA, 20 nt, Artificial Sequence
  synthesized
uauauaacugacccucaagc

SEQ ID NO: 1458 - RNA, 20 nt, Artificial Sequence
  synthesized
uauauaacugacccucgagc

SEQ ID NO: 1459 - RNA, 20 nt, Artificial Sequence
  synthesized
ucaagcaguccagaaaaaau

SEQ ID NO: 1460 - RNA, 20 nt, Artificial Sequence
  synthesized
ucgagcaguccagaaaaaau

SEQ ID NO: 1461 - RNA, 20 nt, Artificial Sequence
  synthesized
ucuggacugcucgaggguca

SEQ ID NO: 1462 - RNA, 20 nt, Artificial Sequence
  synthesized
ucuggacugcuugaggguca

SEQ ID NO: 1463 - RNA, 20 nt, Artificial Sequence
  synthesized
ugagggucaguuauauacau

SEQ ID NO: 1464 - RNA, 20 nt, Artificial Sequence
  synthesized
ugcucgagggucaguuauau

SEQ ID NO: 1465 - RNA, 20 nt, Artificial Sequence
  synthesized
ugcuugagggucaguuauau

SEQ ID NO: 1466 - RNA, 20 nt, Artificial Sequence
  synthesized
uggacugcucgagggucagu

SEQ ID NO: 1467 - RNA, 20 nt, Artificial Sequence
  synthesized
uggacugcuugagggucagu

SEQ ID NO: 1468 - RNA, 20 nt, Artificial Sequence
  synthesized
uguauauaacugacccucaa

SEQ ID NO: 1469 - RNA, 20 nt, Artificial Sequence
  synthesized
uguauauaacugacccucga

SEQ ID NO: 1470 - RNA, 20 nt, Artificial Sequence
  synthesized
uucuggacugcucgaggguc

SEQ ID NO: 1471 - RNA, 20 nt, Artificial Sequence
  synthesized
uucuggacugcuugaggguc

SEQ ID NO: 1472 - RNA, 20 nt, Artificial Sequence
  synthesized
uuucuggacugcucgagggu

SEQ ID NO: 1473 - RNA, 20 nt, Artificial Sequence
  synthesized
uuucuggacugcuugagggu

SEQ ID NO: 1474 - RNA, 20 nt, Artificial Sequence
  synthesized
acacggaggagagggcgggg

SEQ ID NO: 1475 - RNA, 20 nt, Artificial Sequence
  synthesized
acacggcggagagggcgggg

SEQ ID NO: 1476 - RNA, 20 nt, Artificial Sequence
  synthesized
agccccccgcccucuccgcc

SEQ ID NO: 1477 - RNA, 20 nt, Artificial Sequence
  synthesized
agccccccgcccucuccucc

SEQ ID NO: 1478 - RNA, 20 nt, Artificial Sequence
  synthesized
aggagagggcggggggcugc

SEQ ID NO: 1479 - RNA, 20 nt, Artificial Sequence
  synthesized
cacggaggagagggcggggg

SEQ ID NO: 1480 - RNA, 20 nt, Artificial Sequence
  synthesized
cacggcggagagggcggggg

SEQ ID NO: 1481 - RNA, 20 nt, Artificial Sequence
  synthesized
cccaccgugaacacggagga

SEQ ID NO: 1482 - RNA, 20 nt, Artificial Sequence
  synthesized
cccaccgugaacacggcgga

SEQ ID NO: 1483 - RNA, 20 nt, Artificial Sequence
  synthesized
cccccaccgugaacacggag

SEQ ID NO: 1484 - RNA, 20 nt, Artificial Sequence
  synthesized
cccccaccgugaacacggcg

SEQ ID NO: 1485 - RNA, 20 nt, Artificial Sequence
  synthesized
ccccccgcccucuccgccgu

SEQ ID NO: 1486 - RNA, 20 nt, Artificial Sequence
  synthesized
ccccccgcccucuccuccgu

SEQ ID NO: 1487 - RNA, 20 nt, Artificial Sequence
  synthesized
cccccgcccucuccgccgug

SEQ ID NO: 1488 - RNA, 20 nt, Artificial Sequence
  synthesized
cccccgcccucuccuccgug

SEQ ID NO: 1489 - RNA, 20 nt, Artificial Sequence
  synthesized
ccccgcccucuccgccgugu

SEQ ID NO: 1490 - RNA, 20 nt, Artificial Sequence
  synthesized
ccccgcccucuccuccgugu

SEQ ID NO: 1491 - RNA, 20 nt, Artificial Sequence
  synthesized
cccgcccucuccgccguguu

SEQ ID NO: 1492 - RNA, 20 nt, Artificial Sequence
  synthesized
cccgcccucuccuccguguu

SEQ ID NO: 1493 - RNA, 20 nt, Artificial Sequence
  synthesized
cccucuccgccguguucacg

SEQ ID NO: 1494 - RNA, 20 nt, Artificial Sequence
  synthesized
cccucuccuccguguucacg

SEQ ID NO: 1495 - RNA, 20 nt, Artificial Sequence
  synthesized
ccgcccucuccgccguguuc

SEQ ID NO: 1496 - RNA, 20 nt, Artificial Sequence
  synthesized
ccgcccucuccuccguguuc

SEQ ID NO: 1497 - RNA, 20 nt, Artificial Sequence
  synthesized
ccgccguguucacggugggg

SEQ ID NO: 1498 - RNA, 20 nt, Artificial Sequence
  synthesized
ccgugaacacggaggagagg

SEQ ID NO: 1499 - RNA, 20 nt, Artificial Sequence
  synthesized
ccgugaacacggcggagagg

SEQ ID NO: 1500 - RNA, 20 nt, Artificial Sequence
  synthesized
ccuccguguucacggugggg

SEQ ID NO: 1501 - RNA, 20 nt, Artificial Sequence
  synthesized
cgccguguucacgguggggg

SEQ ID NO: 1502 - RNA, 20 nt, Artificial Sequence
  synthesized
cggagagggcggggggcugc

SEQ ID NO: 1503 - RNA, 20 nt, Artificial Sequence
  synthesized
cuccguguucacgguggggg

SEQ ID NO: 1504 - RNA, 20 nt, Artificial Sequence
  synthesized
cugcagccccccgcccucuc

SEQ ID NO: 1505 - RNA, 20 nt, Artificial Sequence
  synthesized
gccccccgcccucuccgccg

SEQ ID NO: 1506 - RNA, 20 nt, Artificial Sequence
  synthesized
gccccccgcccucuccuccg

SEQ ID NO: 1507 - RNA, 20 nt, Artificial Sequence
  synthesized
gccguguucacggugggggu

SEQ ID NO: 1508 - RNA, 20 nt, Artificial Sequence
  synthesized
gcggagagggcggggggcug

SEQ ID NO: 1509 - RNA, 20 nt, Artificial Sequence
  synthesized
gcugcagccccccgcccucu

SEQ ID NO: 1510 - RNA, 20 nt, Artificial Sequence
  synthesized
ggaggagagggcggggggcu

SEQ ID NO: 1511 - RNA, 20 nt, Artificial Sequence
  synthesized
uccgccguguucacgguggg

SEQ ID NO: 1512 - RNA, 20 nt, Artificial Sequence
  synthesized
uccguguucacggugggggu

SEQ ID NO: 1513 - RNA, 20 nt, Artificial Sequence
  synthesized
uccuccguguucacgguggg

SEQ ID NO: 1514 - RNA, 20 nt, Artificial Sequence
  synthesized
acauuguucucuggugacug

SEQ ID NO: 1515 - RNA, 20 nt, Artificial Sequence
  synthesized
accagaggacaaugugaaag

SEQ ID NO: 1516 - RNA, 20 nt, Artificial Sequence
  synthesized
agaggacaaugugaaagcag

SEQ ID NO: 1517 - RNA, 20 nt, Artificial Sequence
  synthesized
agcagucaccagagaacaau

SEQ ID NO: 1518 - RNA, 20 nt, Artificial Sequence
  synthesized
aggacaaugugaaagcagaa

SEQ ID NO: 1519 - RNA, 20 nt, Artificial Sequence
  synthesized
agucaccagaggacaaugug

SEQ ID NO: 1520 - RNA, 20 nt, Artificial Sequence
  synthesized
auuguccucuggugacugcu

SEQ ID NO: 1521 - RNA, 20 nt, Artificial Sequence
  synthesized
auuguucucuggugacugcu

SEQ ID NO: 1522 - RNA, 20 nt, Artificial Sequence
  synthesized
cacauuguucucuggugacu

SEQ ID NO: 1523 - RNA, 20 nt, Artificial Sequence
  synthesized
caccagaggacaaugugaaa

SEQ ID NO: 1524 - RNA, 20 nt, Artificial Sequence
  synthesized
cagaggacaaugugaaagca

SEQ ID NO: 1525 - RNA, 20 nt, Artificial Sequence
  synthesized
cauuguccucuggugacugc

SEQ ID NO: 1526 - RNA, 20 nt, Artificial Sequence
  synthesized
cauuguucucuggugacugc

SEQ ID NO: 1527 - RNA, 20 nt, Artificial Sequence
  synthesized
ccucuggugacugcugcccc

SEQ ID NO: 1528 - RNA, 20 nt, Artificial Sequence
  synthesized
cuucugcuuucacauugucc

SEQ ID NO: 1529 - RNA, 20 nt, Artificial Sequence
  synthesized
cuuucacauuguccucuggu

SEQ ID NO: 1530 - RNA, 20 nt, Artificial Sequence
  synthesized
gaggacaaugugaaagcaga

SEQ ID NO: 1531 - RNA, 20 nt, Artificial Sequence
  synthesized
gcagcagucaccagagaaca

SEQ ID NO: 1532 - RNA, 20 nt, Artificial Sequence
  synthesized
gcuucugcuuucacauuguc

SEQ ID NO: 1533 - RNA, 20 nt, Artificial Sequence
  synthesized
ggacaaugugaaagcagaag

SEQ ID NO: 1534 - RNA, 20 nt, Artificial Sequence
  synthesized
ggcagcagucaccagagaac

SEQ ID NO: 1535 - RNA, 20 nt, Artificial Sequence
  synthesized
ggcagcagucaccagaggac

SEQ ID NO: 1536 - RNA, 20 nt, Artificial Sequence
  synthesized
gggcagcagucaccagagaa

SEQ ID NO: 1537 - RNA, 20 nt, Artificial Sequence
  synthesized
gggcagcagucaccagagga

SEQ ID NO: 1538 - RNA, 20 nt, Artificial Sequence
  synthesized
ggggcagcagucaccagaga

SEQ ID NO: 1539 - RNA, 20 nt, Artificial Sequence
  synthesized
ggggcagcagucaccagagg

SEQ ID NO: 1540 - RNA, 20 nt, Artificial Sequence
  synthesized
gggggcagcagucaccagag

SEQ ID NO: 1541 - RNA, 20 nt, Artificial Sequence
  synthesized
guucucuggugacugcugcc

SEQ ID NO: 1542 - RNA, 20 nt, Artificial Sequence
  synthesized
ucacauuguucucuggugac

SEQ ID NO: 1543 - RNA, 20 nt, Artificial Sequence
  synthesized
ucaccagaggacaaugugaa

SEQ ID NO: 1544 - RNA, 20 nt, Artificial Sequence
  synthesized
uccucuggugacugcugccc

SEQ ID NO: 1545 - RNA, 20 nt, Artificial Sequence
  synthesized
ucucuggugacugcugcccc

SEQ ID NO: 1546 - RNA, 20 nt, Artificial Sequence
  synthesized
ugcuuucacauuguccucug

SEQ ID NO: 1547 - RNA, 20 nt, Artificial Sequence
  synthesized
uguucucuggugacugcugc

SEQ ID NO: 1548 - RNA, 20 nt, Artificial Sequence
  synthesized
uucacauuguccucugguga

SEQ ID NO: 1549 - RNA, 20 nt, Artificial Sequence
  synthesized
uucacauuguucucugguga

SEQ ID NO: 1550 - RNA, 20 nt, Artificial Sequence
  synthesized
uucucuggugacugcugccc

SEQ ID NO: 1551 - RNA, 20 nt, Artificial Sequence
  synthesized
uucugcuuucacauuguccu

SEQ ID NO: 1552 - RNA, 20 nt, Artificial Sequence
  synthesized
uuguccucuggugacugcug

SEQ ID NO: 1553 - RNA, 20 nt, Artificial Sequence
  synthesized
uuguucucuggugacugcug

SEQ ID NO: 1554 - RNA, 20 nt, Artificial Sequence
  synthesized
uuucacauuguccucuggug

SEQ ID NO: 1555 - RNA, 20 nt, Artificial Sequence
  synthesized
aagagcccgaggaacacagc

SEQ ID NO: 1556 - RNA, 20 nt, Artificial Sequence
  synthesized
aagagcccggggaacacagc

SEQ ID NO: 1557 - RNA, 20 nt, Artificial Sequence
  synthesized
agaagagcccgaggaacaca

SEQ ID NO: 1558 - RNA, 20 nt, Artificial Sequence
  synthesized
agaagagcccggggaacaca

SEQ ID NO: 1559 - RNA, 20 nt, Artificial Sequence
  synthesized
agagcccgaggaacacagcc

SEQ ID NO: 1560 - RNA, 20 nt, Artificial Sequence
  synthesized
agagcccggggaacacagcc

SEQ ID NO: 1561 - RNA, 20 nt, Artificial Sequence
  synthesized
agcccgaggaacacagccca

SEQ ID NO: 1562 - RNA, 20 nt, Artificial Sequence
  synthesized
agcccggggaacacagccca

SEQ ID NO: 1563 - RNA, 20 nt, Artificial Sequence
  synthesized
aggaacacagcccagcaaug

SEQ ID NO: 1564 - RNA, 20 nt, Artificial Sequence
  synthesized
agguccagaagagcccgagg

SEQ ID NO: 1565 - RNA, 20 nt, Artificial Sequence
  synthesized
agguccagaagagcccgggg

SEQ ID NO: 1566 - RNA, 20 nt, Artificial Sequence
  synthesized
cagaagagcccgaggaacac

SEQ ID NO: 1567 - RNA, 20 nt, Artificial Sequence
  synthesized
cagaagagcccggggaacac

SEQ ID NO: 1568 - RNA, 20 nt, Artificial Sequence
  synthesized
ccagaagagcccgaggaaca

SEQ ID NO: 1569 - RNA, 20 nt, Artificial Sequence
  synthesized
ccagaagagcccggggaaca

SEQ ID NO: 1570 - RNA, 20 nt, Artificial Sequence
  synthesized
ccccgggcucuucuggaccu

SEQ ID NO: 1571 - RNA, 20 nt, Artificial Sequence
  synthesized
cccgggcucuucuggaccuu

SEQ ID NO: 1572 - RNA, 20 nt, Artificial Sequence
  synthesized
ccgggcucuucuggaccuug

SEQ ID NO: 1573 - RNA, 20 nt, Artificial Sequence
  synthesized
ccggggaacacagcccagca

SEQ ID NO: 1574 - RNA, 20 nt, Artificial Sequence
  synthesized
cucgggcucuucuggaccuu

SEQ ID NO: 1575 - RNA, 20 nt, Artificial Sequence
  synthesized
cugggcuguguuccccgggc

SEQ ID NO: 1576 - RNA, 20 nt, Artificial Sequence
  synthesized
cugggcuguguuccucgggc

SEQ ID NO: 1577 - RNA, 20 nt, Artificial Sequence
  synthesized
gagcccgaggaacacagccc

SEQ ID NO: 1578 - RNA, 20 nt, Artificial Sequence
  synthesized
gagcccggggaacacagccc

SEQ ID NO: 1579 - RNA, 20 nt, Artificial Sequence
  synthesized
gaggaacacagcccagcaau

SEQ ID NO: 1580 - RNA, 20 nt, Artificial Sequence
  synthesized
gcauugcugggcuguguucc

SEQ ID NO: 1581 - RNA, 20 nt, Artificial Sequence
  synthesized
gcugggcuguguuccccggg

SEQ ID NO: 1582 - RNA, 20 nt, Artificial Sequence
  synthesized
gcugggcuguguuccucggg

SEQ ID NO: 1583 - RNA, 20 nt, Artificial Sequence
  synthesized
ggcuguguuccccgggcucu

SEQ ID NO: 1584 - RNA, 20 nt, Artificial Sequence
  synthesized
ggcuguguuccucgggcucu

SEQ ID NO: 1585 - RNA, 20 nt, Artificial Sequence
  synthesized
gggaacacagcccagcaaug

SEQ ID NO: 1586 - RNA, 20 nt, Artificial Sequence
  synthesized
gggcuguguuccccgggcuc

SEQ ID NO: 1587 - RNA, 20 nt, Artificial Sequence
  synthesized
gggcuguguuccucgggcuc

SEQ ID NO: 1588 - RNA, 20 nt, Artificial Sequence
  synthesized
ggggaacacagcccagcaau

SEQ ID NO: 1589 - RNA, 20 nt, Artificial Sequence
  synthesized
gguccagaagagcccgagga

SEQ ID NO: 1590 - RNA, 20 nt, Artificial Sequence
  synthesized
gguccagaagagcccgggga

SEQ ID NO: 1591 - RNA, 20 nt, Artificial Sequence
  synthesized
guguuccccgggcucuucug

SEQ ID NO: 1592 - RNA, 20 nt, Artificial Sequence
  synthesized
guguuccucgggcucuucug

SEQ ID NO: 1593 - RNA, 20 nt, Artificial Sequence
  synthesized
guuccccgggcucuucugga

SEQ ID NO: 1594 - RNA, 20 nt, Artificial Sequence
  synthesized
guuccucgggcucuucugga

SEQ ID NO: 1595 - RNA, 20 nt, Artificial Sequence
  synthesized
uccagaagagcccgaggaac

SEQ ID NO: 1596 - RNA, 20 nt, Artificial Sequence
  synthesized
uccagaagagcccggggaac

SEQ ID NO: 1597 - RNA, 20 nt, Artificial Sequence
  synthesized
ucgggcucuucuggaccuug

SEQ ID NO: 1598 - RNA, 20 nt, Artificial Sequence
  synthesized
ugcugggcuguguuccccgg

SEQ ID NO: 1599 - RNA, 20 nt, Artificial Sequence
  synthesized
ugcugggcuguguuccucgg

SEQ ID NO: 1600 - RNA, 20 nt, Artificial Sequence
  synthesized
ugggcuguguuccccgggcu

SEQ ID NO: 1601 - RNA, 20 nt, Artificial Sequence
  synthesized
ugggcuguguuccucgggcu

SEQ ID NO: 1602 - RNA, 20 nt, Artificial Sequence
  synthesized
uguuccccgggcucuucugg

SEQ ID NO: 1603 - RNA, 20 nt, Artificial Sequence
  synthesized
uguuccucgggcucuucugg

SEQ ID NO: 1604 - RNA, 20 nt, Artificial Sequence
  synthesized
uuccccgggcucuucuggac

SEQ ID NO: 1605 - RNA, 20 nt, Artificial Sequence
  synthesized
uuccucgggcucuucuggac

SEQ ID NO: 1606 - RNA, 20 nt, Artificial Sequence
  synthesized
uugcugggcuguguuccccg

SEQ ID NO: 1607 - RNA, 20 nt, Artificial Sequence
  synthesized
uugcugggcuguguuccucg

SEQ ID NO: 1608 - RNA, 20 nt, Artificial Sequence
  synthesized
agagagagagagagagaaaa

SEQ ID NO: 1609 - RNA, 20 nt, Artificial Sequence
  synthesized
gagagagagagaaaaaaaga

SEQ ID NO: 1610 - RNA, 20 nt, Artificial Sequence
  synthesized
uuucucucucucucucucuc

SEQ ID NO: 1611 - RNA, 20 nt, Artificial Sequence
  synthesized
acugcuucaucaggaggaua

SEQ ID NO: 1612 - RNA, 20 nt, Artificial Sequence
  synthesized
acugcuucaucagguggaua

SEQ ID NO: 1613 - RNA, 20 nt, Artificial Sequence
  synthesized
agcacugcuucaucaggugg

SEQ ID NO: 1614 - RNA, 20 nt, Artificial Sequence
  synthesized
aggaggauacacucgacagg

SEQ ID NO: 1615 - RNA, 20 nt, Artificial Sequence
  synthesized
aggauacacucgacaggugc

SEQ ID NO: 1616 - RNA, 20 nt, Artificial Sequence
  synthesized
agguggauacacucgacagg

SEQ ID NO: 1617 - RNA, 20 nt, Artificial Sequence
  synthesized
aguguauccaccugaugaag

SEQ ID NO: 1618 - RNA, 20 nt, Artificial Sequence
  synthesized
aguguauccuccugaugaag

SEQ ID NO: 1619 - RNA, 20 nt, Artificial Sequence
  synthesized
caccugucgaguguauccac

SEQ ID NO: 1620 - RNA, 20 nt, Artificial Sequence
  synthesized
caccugucgaguguauccuc

SEQ ID NO: 1621 - RNA, 20 nt, Artificial Sequence
  synthesized
cacugcuucaucagguggau

SEQ ID NO: 1622 - RNA, 20 nt, Artificial Sequence
  synthesized
cagcacugcuucaucaggag

SEQ ID NO: 1623 - RNA, 20 nt, Artificial Sequence
  synthesized
cagcacugcuucaucaggug

SEQ ID NO: 1624 - RNA, 20 nt, Artificial Sequence
  synthesized
caggaggauacacucgacag

SEQ ID NO: 1625 - RNA, 20 nt, Artificial Sequence
  synthesized
cagguggauacacucgacag

SEQ ID NO: 1626 - RNA, 20 nt, Artificial Sequence
  synthesized
caucaggaggauacacucga

SEQ ID NO: 1627 - RNA, 20 nt, Artificial Sequence
  synthesized
caucagguggauacacucga

SEQ ID NO: 1628 - RNA, 20 nt, Artificial Sequence
  synthesized
ccugucgaguguauccaccu

SEQ ID NO: 1629 - RNA, 20 nt, Artificial Sequence
  synthesized
ccugucgaguguauccuccu

SEQ ID NO: 1630 - RNA, 20 nt, Artificial Sequence
  synthesized
cgaguguauccaccugauga

SEQ ID NO: 1631 - RNA, 20 nt, Artificial Sequence
  synthesized
cgaguguauccuccugauga

SEQ ID NO: 1632 - RNA, 20 nt, Artificial Sequence
  synthesized
cuccugaugaagcagugcug

SEQ ID NO: 1633 - RNA, 20 nt, Artificial Sequence
  synthesized
cugcccagcacugcuucauc

SEQ ID NO: 1634 - RNA, 20 nt, Artificial Sequence
  synthesized
cugcuucaucaggaggauac

SEQ ID NO: 1635 - RNA, 20 nt, Artificial Sequence
  synthesized
cugcuucaucagguggauac

SEQ ID NO: 1636 - RNA, 20 nt, Artificial Sequence
  synthesized
cugucgaguguauccaccug

SEQ ID NO: 1637 - RNA, 20 nt, Artificial Sequence
  synthesized
cugucgaguguauccuccug

SEQ ID NO: 1638 - RNA, 20 nt, Artificial Sequence
  synthesized
gaguguauccaccugaugaa

SEQ ID NO: 1639 - RNA, 20 nt, Artificial Sequence
  synthesized
gaguguauccuccugaugaa

SEQ ID NO: 1640 - RNA, 20 nt, Artificial Sequence
  synthesized
gcaccugucgaguguaucca

SEQ ID NO: 1641 - RNA, 20 nt, Artificial Sequence
  synthesized
gcaccugucgaguguauccu

SEQ ID NO: 1642 - RNA, 20 nt, Artificial Sequence
  synthesized
gcacugcuucaucaggugga

SEQ ID NO: 1643 - RNA, 20 nt, Artificial Sequence
  synthesized
gcuucaucaggaggauacac

SEQ ID NO: 1644 - RNA, 20 nt, Artificial Sequence
  synthesized
gcuucaucagguggauacac

SEQ ID NO: 1645 - RNA, 20 nt, Artificial Sequence
  synthesized
ggaggauacacucgacaggu

SEQ ID NO: 1646 - RNA, 20 nt, Artificial Sequence
  synthesized
gguggauacacucgacaggu

SEQ ID NO: 1647 - RNA, 20 nt, Artificial Sequence
  synthesized
guauccaccugaugaagcag

SEQ ID NO: 1648 - RNA, 20 nt, Artificial Sequence
  synthesized
gucgaguguauccaccugau

SEQ ID NO: 1649 - RNA, 20 nt, Artificial Sequence
  synthesized
gucgaguguauccuccugau

SEQ ID NO: 1650 - RNA, 20 nt, Artificial Sequence
  synthesized
uauccaccugaugaagcagu

SEQ ID NO: 1651 - RNA, 20 nt, Artificial Sequence
  synthesized
uauccuccugaugaagcagu

SEQ ID NO: 1652 - RNA, 20 nt, Artificial Sequence
  synthesized
ucaucaggaggauacacucg

SEQ ID NO: 1653 - RNA, 20 nt, Artificial Sequence
  synthesized
ucaucagguggauacacucg

SEQ ID NO: 1654 - RNA, 20 nt, Artificial Sequence
  synthesized
uccugaugaagcagugcugg

SEQ ID NO: 1655 - RNA, 20 nt, Artificial Sequence
  synthesized
ucgaguguauccaccugaug

SEQ ID NO: 1656 - RNA, 20 nt, Artificial Sequence
  synthesized
ucgaguguauccuccugaug

SEQ ID NO: 1657 - RNA, 20 nt, Artificial Sequence
  synthesized
uggauacacucgacaggugc

SEQ ID NO: 1658 - RNA, 20 nt, Artificial Sequence
  synthesized
uguauccaccugaugaagca

SEQ ID NO: 1659 - RNA, 20 nt, Artificial Sequence
  synthesized
uucaucaggaggauacacuc

SEQ ID NO: 1660 - RNA, 20 nt, Artificial Sequence
  synthesized
uucaucagguggauacacuc

SEQ ID NO: 1661 - RNA, 20 nt, Artificial Sequence
  synthesized
aacgccccacccaagccagg

SEQ ID NO: 1662 - RNA, 20 nt, Artificial Sequence
  synthesized
aacgucccacccaagccagg

SEQ ID NO: 1663 - RNA, 20 nt, Artificial Sequence
  synthesized
acaccuggcuugggugggac

SEQ ID NO: 1664 - RNA, 20 nt, Artificial Sequence
  synthesized
acaccuggcuuggguggggc

SEQ ID NO: 1665 - RNA, 20 nt, Artificial Sequence
  synthesized
accuggcuugggugggacgu

SEQ ID NO: 1666 - RNA, 20 nt, Artificial Sequence
  synthesized
accuggcuuggguggggcgu

SEQ ID NO: 1667 - RNA, 20 nt, Artificial Sequence
  synthesized
acgccccacccaagccaggu

SEQ ID NO: 1668 - RNA, 20 nt, Artificial Sequence
  synthesized
acgucccacccaagccaggu

SEQ ID NO: 1669 - RNA, 20 nt, Artificial Sequence
  synthesized
caccuggcuugggugggacg

SEQ ID NO: 1670 - RNA, 20 nt, Artificial Sequence
  synthesized
caccuggcuuggguggggcg

SEQ ID NO: 1671 - RNA, 20 nt, Artificial Sequence
  synthesized
ccccucugcugccugcagaa

SEQ ID NO: 1672 - RNA, 20 nt, Artificial Sequence
  synthesized
cccucugcugccugcagaac

SEQ ID NO: 1673 - RNA, 20 nt, Artificial Sequence
  synthesized
ccugcagaacgccccaccca

SEQ ID NO: 1674 - RNA, 20 nt, Artificial Sequence
  synthesized
ccugcagaacgucccaccca

SEQ ID NO: 1675 - RNA, 20 nt, Artificial Sequence
  synthesized
ccuggcuugggugggacguu

SEQ ID NO: 1676 - RNA, 20 nt, Artificial Sequence
  synthesized
ccuggcuuggguggggcguu

SEQ ID NO: 1677 - RNA, 20 nt, Artificial Sequence
  synthesized
cgccccacccaagccaggug

SEQ ID NO: 1678 - RNA, 20 nt, Artificial Sequence
  synthesized
cgucccacccaagccaggug

SEQ ID NO: 1679 - RNA, 20 nt, Artificial Sequence
  synthesized
cucugcugccugcagaacgc

SEQ ID NO: 1680 - RNA, 20 nt, Artificial Sequence
  synthesized
cucugcugccugcagaacgu

SEQ ID NO: 1681 - RNA, 20 nt, Artificial Sequence
  synthesized
cugcagaacgccccacccaa

SEQ ID NO: 1682 - RNA, 20 nt, Artificial Sequence
  synthesized
cugcagaacgucccacccaa

SEQ ID NO: 1683 - RNA, 20 nt, Artificial Sequence
  synthesized
cugcugccugcagaacgccc

SEQ ID NO: 1684 - RNA, 20 nt, Artificial Sequence
  synthesized
cugcugccugcagaacgucc

SEQ ID NO: 1685 - RNA, 20 nt, Artificial Sequence
  synthesized
cuggcuugggugggacguuc

SEQ ID NO: 1686 - RNA, 20 nt, Artificial Sequence
  synthesized
cuggcuuggguggggcguuc

SEQ ID NO: 1687 - RNA, 20 nt, Artificial Sequence
  synthesized
gaacgccccacccaagccag

SEQ ID NO: 1688 - RNA, 20 nt, Artificial Sequence
  synthesized
gaacgucccacccaagccag

SEQ ID NO: 1689 - RNA, 20 nt, Artificial Sequence
  synthesized
gacaccuggcuuggguggga

SEQ ID NO: 1690 - RNA, 20 nt, Artificial Sequence
  synthesized
gacaccuggcuugggugggg

SEQ ID NO: 1691 - RNA, 20 nt, Artificial Sequence
  synthesized
gcagaacgccccacccaagc

SEQ ID NO: 1692 - RNA, 20 nt, Artificial Sequence
  synthesized
gcagaacgucccacccaagc

SEQ ID NO: 1693 - RNA, 20 nt, Artificial Sequence
  synthesized
gccugcagaacgccccaccc

SEQ ID NO: 1694 - RNA, 20 nt, Artificial Sequence
  synthesized
gccugcagaacgucccaccc

SEQ ID NO: 1695 - RNA, 20 nt, Artificial Sequence
  synthesized
gcugccugcagaacgcccca

SEQ ID NO: 1696 - RNA, 20 nt, Artificial Sequence
  synthesized
gcugccugcagaacguccca

SEQ ID NO: 1697 - RNA, 20 nt, Artificial Sequence
  synthesized
ggcuugggugggacguucug

SEQ ID NO: 1698 - RNA, 20 nt, Artificial Sequence
  synthesized
ggcuuggguggggcguucug

SEQ ID NO: 1699 - RNA, 20 nt, Artificial Sequence
  synthesized
gggugggacguucugcaggc

SEQ ID NO: 1700 - RNA, 20 nt, Artificial Sequence
  synthesized
ggguggggcguucugcaggc

SEQ ID NO: 1701 - RNA, 20 nt, Artificial Sequence
  synthesized
ggugggacguucugcaggca

SEQ ID NO: 1702 - RNA, 20 nt, Artificial Sequence
  synthesized
gguggggcguucugcaggca

SEQ ID NO: 1703 - RNA, 20 nt, Artificial Sequence
  synthesized
gugggacguucugcaggcag

SEQ ID NO: 1704 - RNA, 20 nt, Artificial Sequence
  synthesized
guggggcguucugcaggcag

SEQ ID NO: 1705 - RNA, 20 nt, Artificial Sequence
  synthesized
ucccacccaagccagguguc

SEQ ID NO: 1706 - RNA, 20 nt, Artificial Sequence
  synthesized
ucugcugccugcagaacgcc

SEQ ID NO: 1707 - RNA, 20 nt, Artificial Sequence
  synthesized
ucugcugccugcagaacguc

SEQ ID NO: 1708 - RNA, 20 nt, Artificial Sequence
  synthesized
ugcagaacgccccacccaag

SEQ ID NO: 1709 - RNA, 20 nt, Artificial Sequence
  synthesized
ugcagaacgucccacccaag

SEQ ID NO: 1710 - RNA, 20 nt, Artificial Sequence
  synthesized
ugccugcagaacgucccacc

SEQ ID NO: 1711 - RNA, 20 nt, Artificial Sequence
  synthesized
ugcugccugcagaacgcccc

SEQ ID NO: 1712 - RNA, 20 nt, Artificial Sequence
  synthesized
ugcugccugcagaacguccc

SEQ ID NO: 1713 - RNA, 20 nt, Artificial Sequence
  synthesized
ugggugggacguucugcagg

SEQ ID NO: 1714 - RNA, 20 nt, Artificial Sequence
  synthesized
uggguggggcguucugcagg

SEQ ID NO: 1715 - RNA, 20 nt, Artificial Sequence
  synthesized
uugggugggacguucugcag

SEQ ID NO: 1716 - RNA, 20 nt, Artificial Sequence
  synthesized
uuggguggggcguucugcag

SEQ ID NO: 1717 - RNA, 20 nt, Artificial Sequence
  synthesized
aaguucccugauuauaccca

SEQ ID NO: 1718 - RNA, 20 nt, Artificial Sequence
  synthesized
aaguucccugauuaugccca

SEQ ID NO: 1719 - RNA, 20 nt, Artificial Sequence
  synthesized
acccacaggagaagcagcca

SEQ ID NO: 1720 - RNA, 20 nt, Artificial Sequence
  synthesized
acuugggcaaguucccugau

SEQ ID NO: 1721 - RNA, 20 nt, Artificial Sequence
  synthesized
auacccacaggagaagcagc

SEQ ID NO: 1722 - RNA, 20 nt, Artificial Sequence
  synthesized
augcccacaggagaagcagc

SEQ ID NO: 1723 - RNA, 20 nt, Artificial Sequence
  synthesized
auuauacccacaggagaagc

SEQ ID NO: 1724 - RNA, 20 nt, Artificial Sequence
  synthesized
auuaugcccacaggagaagc

SEQ ID NO: 1725 - RNA, 20 nt, Artificial Sequence
  synthesized
caaguucccugauuauaccc

SEQ ID NO: 1726 - RNA, 20 nt, Artificial Sequence
  synthesized
caaguucccugauuaugccc

SEQ ID NO: 1727 - RNA, 20 nt, Artificial Sequence
  synthesized
cauaaucagggaacuugccc

SEQ ID NO: 1728 - RNA, 20 nt, Artificial Sequence
  synthesized
cccugauuauacccacagga

SEQ ID NO: 1729 - RNA, 20 nt, Artificial Sequence
  synthesized
cccugauuaugcccacagga

SEQ ID NO: 1730 - RNA, 20 nt, Artificial Sequence
  synthesized
ccugauuauacccacaggag

SEQ ID NO: 1731 - RNA, 20 nt, Artificial Sequence
  synthesized
ccugauuaugcccacaggag

SEQ ID NO: 1732 - RNA, 20 nt, Artificial Sequence
  synthesized
ccugugggcauaaucaggga

SEQ ID NO: 1733 - RNA, 20 nt, Artificial Sequence
  synthesized
ccuguggguauaaucaggga

SEQ ID NO: 1734 - RNA, 20 nt, Artificial Sequence
  synthesized
cuccugugggcauaaucagg

SEQ ID NO: 1735 - RNA, 20 nt, Artificial Sequence
  synthesized
cuccuguggguauaaucagg

SEQ ID NO: 1736 - RNA, 20 nt, Artificial Sequence
  synthesized
cugcuucuccugugggcaua

SEQ ID NO: 1737 - RNA, 20 nt, Artificial Sequence
  synthesized
cugcuucuccuguggguaua

SEQ ID NO: 1738 - RNA, 20 nt, Artificial Sequence
  synthesized
cugugggcauaaucagggaa

SEQ ID NO: 1739 - RNA, 20 nt, Artificial Sequence
  synthesized
cuguggguauaaucagggaa

SEQ ID NO: 1740 - RNA, 20 nt, Artificial Sequence
  synthesized
gauuauacccacaggagaag

SEQ ID NO: 1741 - RNA, 20 nt, Artificial Sequence
  synthesized
gauuaugcccacaggagaag

SEQ ID NO: 1742 - RNA, 20 nt, Artificial Sequence
  synthesized
gcaaguucccugauuauacc

SEQ ID NO: 1743 - RNA, 20 nt, Artificial Sequence
  synthesized
gcaaguucccugauuaugcc

SEQ ID NO: 1744 - RNA, 20 nt, Artificial Sequence
  synthesized
gcauaaucagggaacuugcc

SEQ ID NO: 1745 - RNA, 20 nt, Artificial Sequence
  synthesized
gcccacaggagaagcagcca

SEQ ID NO: 1746 - RNA, 20 nt, Artificial Sequence
  synthesized
gcugcuucuccugugggcau

SEQ ID NO: 1747 - RNA, 20 nt, Artificial Sequence
  synthesized
gcugcuucuccuguggguau

SEQ ID NO: 1748 - RNA, 20 nt, Artificial Sequence
  synthesized
gcuucuccugugggcauaau

SEQ ID NO: 1749 - RNA, 20 nt, Artificial Sequence
  synthesized
gcuucuccuguggguauaau

SEQ ID NO: 1750 - RNA, 20 nt, Artificial Sequence
  synthesized
ggcaaguucccugauuauac

SEQ ID NO: 1751 - RNA, 20 nt, Artificial Sequence
  synthesized
ggcaaguucccugauuaugc

SEQ ID NO: 1752 - RNA, 20 nt, Artificial Sequence
  synthesized
ggcauaaucagggaacuugc

SEQ ID NO: 1753 - RNA, 20 nt, Artificial Sequence
  synthesized
ggcugcuucuccugugggca

SEQ ID NO: 1754 - RNA, 20 nt, Artificial Sequence
  synthesized
ggcugcuucuccugugggua

SEQ ID NO: 1755 - RNA, 20 nt, Artificial Sequence
  synthesized
gggcaaguucccugauuaua

SEQ ID NO: 1756 - RNA, 20 nt, Artificial Sequence
  synthesized
gggcaaguucccugauuaug

SEQ ID NO: 1757 - RNA, 20 nt, Artificial Sequence
  synthesized
gggcauaaucagggaacuug

SEQ ID NO: 1758 - RNA, 20 nt, Artificial Sequence
  synthesized
ggguauaaucagggaacuug

SEQ ID NO: 1759 - RNA, 20 nt, Artificial Sequence
  synthesized
gguauaaucagggaacuugc

SEQ ID NO: 1760 - RNA, 20 nt, Artificial Sequence
  synthesized
guauaaucagggaacuugcc

SEQ ID NO: 1761 - RNA, 20 nt, Artificial Sequence
  synthesized
gugggcauaaucagggaacu

SEQ ID NO: 1762 - RNA, 20 nt, Artificial Sequence
  synthesized
guggguauaaucagggaacu

SEQ ID NO: 1763 - RNA, 20 nt, Artificial Sequence
  synthesized
uacccacaggagaagcagcc

SEQ ID NO: 1764 - RNA, 20 nt, Artificial Sequence
  synthesized
uauacccacaggagaagcag

SEQ ID NO: 1765 - RNA, 20 nt, Artificial Sequence
  synthesized
uaugcccacaggagaagcag

SEQ ID NO: 1766 - RNA, 20 nt, Artificial Sequence
  synthesized
uccugugggcauaaucaggg

SEQ ID NO: 1767 - RNA, 20 nt, Artificial Sequence
  synthesized
uccuguggguauaaucaggg

SEQ ID NO: 1768 - RNA, 20 nt, Artificial Sequence
  synthesized
ugauuauacccacaggagaa

SEQ ID NO: 1769 - RNA, 20 nt, Artificial Sequence
  synthesized
ugauuaugcccacaggagaa

SEQ ID NO: 1770 - RNA, 20 nt, Artificial Sequence
  synthesized
ugcccacaggagaagcagcc

SEQ ID NO: 1771 - RNA, 20 nt, Artificial Sequence
  synthesized
ugcuucuccugugggcauaa

SEQ ID NO: 1772 - RNA, 20 nt, Artificial Sequence
  synthesized
ugcuucuccuguggguauaa

SEQ ID NO: 1773 - RNA, 20 nt, Artificial Sequence
  synthesized
uggcugcuucuccugugggc

SEQ ID NO: 1774 - RNA, 20 nt, Artificial Sequence
  synthesized
uggcugcuucuccugugggu

SEQ ID NO: 1775 - RNA, 20 nt, Artificial Sequence
  synthesized
ugggcauaaucagggaacuu

SEQ ID NO: 1776 - RNA, 20 nt, Artificial Sequence
  synthesized
uggguauaaucagggaacuu

SEQ ID NO: 1777 - RNA, 20 nt, Artificial Sequence
  synthesized
ugugggcauaaucagggaac

SEQ ID NO: 1778 - RNA, 20 nt, Artificial Sequence
  synthesized
uguggguauaaucagggaac

SEQ ID NO: 1779 - RNA, 20 nt, Artificial Sequence
  synthesized
uuauacccacaggagaagca

SEQ ID NO: 1780 - RNA, 20 nt, Artificial Sequence
  synthesized
uuaugcccacaggagaagca

SEQ ID NO: 1781 - RNA, 20 nt, Artificial Sequence
  synthesized
uucccugauuauacccacag

SEQ ID NO: 1782 - RNA, 20 nt, Artificial Sequence
  synthesized
uucccugauuaugcccacag

SEQ ID NO: 1783 - RNA, 20 nt, Artificial Sequence
  synthesized
aaucuaggggcaucgauggg

SEQ ID NO: 1784 - RNA, 20 nt, Artificial Sequence
  synthesized
aggggcaucgaugggaaauu

SEQ ID NO: 1785 - RNA, 20 nt, Artificial Sequence
  synthesized
aggggcauugaugggaaauu

SEQ ID NO: 1786 - RNA, 20 nt, Artificial Sequence
  synthesized
aucaaugccccuagauucuu

SEQ ID NO: 1787 - RNA, 20 nt, Artificial Sequence
  synthesized
aucgaugccccuagauucuu

SEQ ID NO: 1788 - RNA, 20 nt, Artificial Sequence
  synthesized
aucgaugggaaauugcaacc

SEQ ID NO: 1789 - RNA, 20 nt, Artificial Sequence
  synthesized
aucuaggggcaucgauggga

SEQ ID NO: 1790 - RNA, 20 nt, Artificial Sequence
  synthesized
aucuaggggcauugauggga

SEQ ID NO: 1791 - RNA, 20 nt, Artificial Sequence
  synthesized
auugaugggaaauugcaacc

SEQ ID NO: 1792 - RNA, 20 nt, Artificial Sequence
  synthesized
auuucccaucgaugccccua

SEQ ID NO: 1793 - RNA, 20 nt, Artificial Sequence
  synthesized
caaugccccuagauucuucc

SEQ ID NO: 1794 - RNA, 20 nt, Artificial Sequence
  synthesized
caauuucccaucaaugcccc

SEQ ID NO: 1795 - RNA, 20 nt, Artificial Sequence
  synthesized
caauuucccaucgaugcccc

SEQ ID NO: 1796 - RNA, 20 nt, Artificial Sequence
  synthesized
caucaaugccccuagauucu

SEQ ID NO: 1797 - RNA, 20 nt, Artificial Sequence
  synthesized
caucgaugccccuagauucu

SEQ ID NO: 1798 - RNA, 20 nt, Artificial Sequence
  synthesized
caucgaugggaaauugcaac

SEQ ID NO: 1799 - RNA, 20 nt, Artificial Sequence
  synthesized
cauugaugggaaauugcaac

SEQ ID NO: 1800 - RNA, 20 nt, Artificial Sequence
  synthesized
ccaucaaugccccuagauuc

SEQ ID NO: 1801 - RNA, 20 nt, Artificial Sequence
  synthesized
ccaucgaugccccuagauuc

SEQ ID NO: 1802 - RNA, 20 nt, Artificial Sequence
  synthesized
cccaucaaugccccuagauu

SEQ ID NO: 1803 - RNA, 20 nt, Artificial Sequence
  synthesized
cccaucgaugccccuagauu

SEQ ID NO: 1804 - RNA, 20 nt, Artificial Sequence
  synthesized
cgaugccccuagauucuucc

SEQ ID NO: 1805 - RNA, 20 nt, Artificial Sequence
  synthesized
cuaggggcaucgaugggaaa

SEQ ID NO: 1806 - RNA, 20 nt, Artificial Sequence
  synthesized
cuaggggcauugaugggaaa

SEQ ID NO: 1807 - RNA, 20 nt, Artificial Sequence
  synthesized
gaaucuaggggcaucgaugg

SEQ ID NO: 1808 - RNA, 20 nt, Artificial Sequence
  synthesized
gaaucuaggggcauugaugg

SEQ ID NO: 1809 - RNA, 20 nt, Artificial Sequence
  synthesized
gcaauuucccaucaaugccc

SEQ ID NO: 1810 - RNA, 20 nt, Artificial Sequence
  synthesized
gcaauuucccaucgaugccc

SEQ ID NO: 1811 - RNA, 20 nt, Artificial Sequence
  synthesized
gcaucgaugggaaauugcaa

SEQ ID NO: 1812 - RNA, 20 nt, Artificial Sequence
  synthesized
gcauugaugggaaauugcaa

SEQ ID NO: 1813 - RNA, 20 nt, Artificial Sequence
  synthesized
ggaagaaucuaggggcaucg

SEQ ID NO: 1814 - RNA, 20 nt, Artificial Sequence
  synthesized
ggaagaaucuaggggcauug

SEQ ID NO: 1815 - RNA, 20 nt, Artificial Sequence
  synthesized
ggcaucgaugggaaauugca

SEQ ID NO: 1816 - RNA, 20 nt, Artificial Sequence
  synthesized
ggcauugaugggaaauugca

SEQ ID NO: 1817 - RNA, 20 nt, Artificial Sequence
  synthesized
gggcaucgaugggaaauugc

SEQ ID NO: 1818 - RNA, 20 nt, Artificial Sequence
  synthesized
gggcauugaugggaaauugc

SEQ ID NO: 1819 - RNA, 20 nt, Artificial Sequence
  synthesized
ggggcaucgaugggaaauug

SEQ ID NO: 1820 - RNA, 20 nt, Artificial Sequence
  synthesized
ggggcauugaugggaaauug

SEQ ID NO: 1821 - RNA, 20 nt, Artificial Sequence
  synthesized
gggguugcaauuucccauca

SEQ ID NO: 1822 - RNA, 20 nt, Artificial Sequence
  synthesized
gggguugcaauuucccaucg

SEQ ID NO: 1823 - RNA, 20 nt, Artificial Sequence
  synthesized
ggguugcaauuucccaucaa

SEQ ID NO: 1824 - RNA, 20 nt, Artificial Sequence
  synthesized
ggguugcaauuucccaucga

SEQ ID NO: 1825 - RNA, 20 nt, Artificial Sequence
  synthesized
gguugcaauuucccaucaau

SEQ ID NO: 1826 - RNA, 20 nt, Artificial Sequence
  synthesized
gguugcaauuucccaucgau

SEQ ID NO: 1827 - RNA, 20 nt, Artificial Sequence
  synthesized
guugcaauuucccaucaaug

SEQ ID NO: 1828 - RNA, 20 nt, Artificial Sequence
  synthesized
guugcaauuucccaucgaug

SEQ ID NO: 1829 - RNA, 20 nt, Artificial Sequence
  synthesized
ucaaugccccuagauucuuc

SEQ ID NO: 1830 - RNA, 20 nt, Artificial Sequence
  synthesized
ucccaucaaugccccuagau

SEQ ID NO: 1831 - RNA, 20 nt, Artificial Sequence
  synthesized
ucccaucgaugccccuagau

SEQ ID NO: 1832 - RNA, 20 nt, Artificial Sequence
  synthesized
ucgaugccccuagauucuuc

SEQ ID NO: 1833 - RNA, 20 nt, Artificial Sequence
  synthesized
ucgaugggaaauugcaaccc

SEQ ID NO: 1834 - RNA, 20 nt, Artificial Sequence
  synthesized
ucuaggggcaucgaugggaa

SEQ ID NO: 1835 - RNA, 20 nt, Artificial Sequence
  synthesized
ucuaggggcauugaugggaa

SEQ ID NO: 1836 - RNA, 20 nt, Artificial Sequence
  synthesized
uggaagaaucuaggggcauc

SEQ ID NO: 1837 - RNA, 20 nt, Artificial Sequence
  synthesized
uggaagaaucuaggggcauu

SEQ ID NO: 1838 - RNA, 20 nt, Artificial Sequence
  synthesized
uucccaucaaugccccuaga

SEQ ID NO: 1839 - RNA, 20 nt, Artificial Sequence
  synthesized
uucccaucgaugccccuaga

SEQ ID NO: 1840 - RNA, 20 nt, Artificial Sequence
  synthesized
uugaugggaaauugcaaccc

SEQ ID NO: 1841 - RNA, 20 nt, Artificial Sequence
  synthesized
uugcaauuucccaucaaugc

SEQ ID NO: 1842 - RNA, 20 nt, Artificial Sequence
  synthesized
uugcaauuucccaucgaugc

SEQ ID NO: 1843 - RNA, 20 nt, Artificial Sequence
  synthesized
uuucccaucaaugccccuag

SEQ ID NO: 1844 - RNA, 20 nt, Artificial Sequence
  synthesized
uuucccaucgaugccccuag

SEQ ID NO: 1845 - RNA, 20 nt, Artificial Sequence
  synthesized
aaauccccugcuggacucag

SEQ ID NO: 1846 - RNA, 20 nt, Artificial Sequence
  synthesized
aauccccugcuggacucagg

SEQ ID NO: 1847 - RNA, 20 nt, Artificial Sequence
  synthesized
aaucccugacccucaaaucc

SEQ ID NO: 1848 - RNA, 20 nt, Artificial Sequence
  synthesized
aaucccugacccucacaucc

SEQ ID NO: 1849 - RNA, 20 nt, Artificial Sequence
  synthesized
acccucaaauccccugcugg

SEQ ID NO: 1850 - RNA, 20 nt, Artificial Sequence
  synthesized
acccucacauccccugcugg

SEQ ID NO: 1851 - RNA, 20 nt, Artificial Sequence
  synthesized
agaaucccugacccucaaau

SEQ ID NO: 1852 - RNA, 20 nt, Artificial Sequence
  synthesized
agaaucccugacccucacau

SEQ ID NO: 1853 - RNA, 20 nt, Artificial Sequence
  synthesized
agcccugaguccagcagggg

SEQ ID NO: 1854 - RNA, 20 nt, Artificial Sequence
  synthesized
aggggaugugagggucaggg

SEQ ID NO: 1855 - RNA, 20 nt, Artificial Sequence
  synthesized
aggggauuugagggucaggg

SEQ ID NO: 1856 - RNA, 20 nt, Artificial Sequence
  synthesized
aguccagcaggggaugugag

SEQ ID NO: 1857 - RNA, 20 nt, Artificial Sequence
  synthesized
aguccagcaggggauuugag

SEQ ID NO: 1858 - RNA, 20 nt, Artificial Sequence
  synthesized
aucccugacccucaaauccc

SEQ ID NO: 1859 - RNA, 20 nt, Artificial Sequence
  synthesized
augugagggucagggauucu

SEQ ID NO: 1860 - RNA, 20 nt, Artificial Sequence
  synthesized
auuugagggucagggauucu

SEQ ID NO: 1861 - RNA, 20 nt, Artificial Sequence
  synthesized
caggggaugugagggucagg

SEQ ID NO: 1862 - RNA, 20 nt, Artificial Sequence
  synthesized
caggggauuugagggucagg

SEQ ID NO: 1863 - RNA, 20 nt, Artificial Sequence
  synthesized
cauccccugcuggacucagg

SEQ ID NO: 1864 - RNA, 20 nt, Artificial Sequence
  synthesized
cccucaaauccccugcugga

SEQ ID NO: 1865 - RNA, 20 nt, Artificial Sequence
  synthesized
cccucacauccccugcugga

SEQ ID NO: 1866 - RNA, 20 nt, Artificial Sequence
  synthesized
cccugacccucaaauccccu

SEQ ID NO: 1867 - RNA, 20 nt, Artificial Sequence
  synthesized
cccugaguccagcaggggau

SEQ ID NO: 1868 - RNA, 20 nt, Artificial Sequence
  synthesized
ccucaaauccccugcuggac

SEQ ID NO: 1869 - RNA, 20 nt, Artificial Sequence
  synthesized
ccucacauccccugcuggac

SEQ ID NO: 1870 - RNA, 20 nt, Artificial Sequence
  synthesized
ccugacccucaaauccccug

SEQ ID NO: 1871 - RNA, 20 nt, Artificial Sequence
  synthesized
ccugacccucacauccccug

SEQ ID NO: 1872 - RNA, 20 nt, Artificial Sequence
  synthesized
cucaaauccccugcuggacu

SEQ ID NO: 1873 - RNA, 20 nt, Artificial Sequence
  synthesized
gaaucccugacccucaaauc

SEQ ID NO: 1874 - RNA, 20 nt, Artificial Sequence
  synthesized
gaaucccugacccucacauc

SEQ ID NO: 1875 - RNA, 20 nt, Artificial Sequence
  synthesized
gacccucaaauccccugcug

SEQ ID NO: 1876 - RNA, 20 nt, Artificial Sequence
  synthesized
gacccucacauccccugcug

SEQ ID NO: 1877 - RNA, 20 nt, Artificial Sequence
  synthesized
gagaaucccugacccucaaa

SEQ ID NO: 1878 - RNA, 20 nt, Artificial Sequence
  synthesized
gagaaucccugacccucaca

SEQ ID NO: 1879 - RNA, 20 nt, Artificial Sequence
  synthesized
gaugugagggucagggauuc

SEQ ID NO: 1880 - RNA, 20 nt, Artificial Sequence
  synthesized
gauuugagggucagggauuc

SEQ ID NO: 1881 - RNA, 20 nt, Artificial Sequence
  synthesized
ggagaaucccugacccucaa

SEQ ID NO: 1882 - RNA, 20 nt, Artificial Sequence
  synthesized
ggagaaucccugacccucac

SEQ ID NO: 1883 - RNA, 20 nt, Artificial Sequence
  synthesized
ggaugugagggucagggauu

SEQ ID NO: 1884 - RNA, 20 nt, Artificial Sequence
  synthesized
ggauuugagggucagggauu

SEQ ID NO: 1885 - RNA, 20 nt, Artificial Sequence
  synthesized
gggaugugagggucagggau

SEQ ID NO: 1886 - RNA, 20 nt, Artificial Sequence
  synthesized
gggauuugagggucagggau

SEQ ID NO: 1887 - RNA, 20 nt, Artificial Sequence
  synthesized
ggggaugugagggucaggga

SEQ ID NO: 1888 - RNA, 20 nt, Artificial Sequence
  synthesized
ggggauuugagggucaggga

SEQ ID NO: 1889 - RNA, 20 nt, Artificial Sequence
  synthesized
guccagcaggggaugugagg

SEQ ID NO: 1890 - RNA, 20 nt, Artificial Sequence
  synthesized
guccagcaggggauuugagg

SEQ ID NO: 1891 - RNA, 20 nt, Artificial Sequence
  synthesized
gugagggucagggauucucc

SEQ ID NO: 1892 - RNA, 20 nt, Artificial Sequence
  synthesized
uccagcaggggaugugaggg

SEQ ID NO: 1893 - RNA, 20 nt, Artificial Sequence
  synthesized
uccagcaggggauuugaggg

SEQ ID NO: 1894 - RNA, 20 nt, Artificial Sequence
  synthesized
ucccugacccucaaaucccc

SEQ ID NO: 1895 - RNA, 20 nt, Artificial Sequence
  synthesized
ugugagggucagggauucuc

SEQ ID NO: 1896 - RNA, 20 nt, Artificial Sequence
  synthesized
uugagggucagggauucucc

SEQ ID NO: 1897 - RNA, 20 nt, Artificial Sequence
  synthesized
uuugagggucagggauucuc

SEQ ID NO: 1898 - RNA, 20 nt, Artificial Sequence
  synthesized
aggggugggcugggagggca

SEQ ID NO: 1899 - RNA, 20 nt, Artificial Sequence
  synthesized
aucuggagcccagccaggua

SEQ ID NO: 1900 - RNA, 20 nt, Artificial Sequence
  synthesized
cagaugcccucccagcccac

SEQ ID NO: 1901 - RNA, 20 nt, Artificial Sequence
  synthesized
ccagaugcccucccagccca

SEQ ID NO: 1902 - RNA, 20 nt, Artificial Sequence
  synthesized
ccuggcugggcuccagaugc

SEQ ID NO: 1903 - RNA, 20 nt, Artificial Sequence
  synthesized
cuaccuggcugggcuccaga

SEQ ID NO: 1904 - RNA, 20 nt, Artificial Sequence
  synthesized
cuccagaugcccucccagcc

SEQ ID NO: 1905 - RNA, 20 nt, Artificial Sequence
  synthesized
cuggcugggcuccagaugcc

SEQ ID NO: 1906 - RNA, 20 nt, Artificial Sequence
  synthesized
cugggagggcaucuggagcc

SEQ ID NO: 1907 - RNA, 20 nt, Artificial Sequence
  synthesized
cugggcuccagaugcccucc

SEQ ID NO: 1908 - RNA, 20 nt, Artificial Sequence
  synthesized
gaaggggugggcugggaggg

SEQ ID NO: 1909 - RNA, 20 nt, Artificial Sequence
  synthesized
gagggcaucuggagcccagc

SEQ ID NO: 1910 - RNA, 20 nt, Artificial Sequence
  synthesized
gaugcccucccagcccaccc

SEQ ID NO: 1911 - RNA, 20 nt, Artificial Sequence
  synthesized
gcaucuggagcccagccagg

SEQ ID NO: 1912 - RNA, 20 nt, Artificial Sequence
  synthesized
gcuccagaugcccucccagc

SEQ ID NO: 1913 - RNA, 20 nt, Artificial Sequence
  synthesized
gcugggagggcaucuggagc

SEQ ID NO: 1914 - RNA, 20 nt, Artificial Sequence
  synthesized
gcugggcuccagaugcccuc

SEQ ID NO: 1915 - RNA, 20 nt, Artificial Sequence
  synthesized
ggcaucuggagcccagccag

SEQ ID NO: 1916 - RNA, 20 nt, Artificial Sequence
  synthesized
ggcuccagaugcccucccag

SEQ ID NO: 1917 - RNA, 20 nt, Artificial Sequence
  synthesized
gggagggcaucuggagccca

SEQ ID NO: 1918 - RNA, 20 nt, Artificial Sequence
  synthesized
gggcaucuggagcccagcca

SEQ ID NO: 1919 - RNA, 20 nt, Artificial Sequence
  synthesized
ggggugggcugggagggcau

SEQ ID NO: 1920 - RNA, 20 nt, Artificial Sequence
  synthesized
gugggcugggagggcaucug

SEQ ID NO: 1921 - RNA, 20 nt, Artificial Sequence
  synthesized
uaccuggcugggcuccagau

SEQ ID NO: 1922 - RNA, 20 nt, Artificial Sequence
  synthesized
uccagaugcccucccagccc

SEQ ID NO: 1923 - RNA, 20 nt, Artificial Sequence
  synthesized
ucuaccuggcugggcuccag

SEQ ID NO: 1924 - RNA, 20 nt, Artificial Sequence
  synthesized
uggcugggcuccagaugccc

SEQ ID NO: 1925 - RNA, 20 nt, Artificial Sequence
  synthesized
ugggagggcaucuggagccc

SEQ ID NO: 1926 - RNA, 20 nt, Artificial Sequence
  synthesized
ugggcuccagaugcccuccc

SEQ ID NO: 1927 - RNA, 20 nt, Artificial Sequence
  synthesized
ugggcugggagggcaucugg

SEQ ID NO: 1928 - RNA, 20 nt, Artificial Sequence
  synthesized
agagagagagaaagaaaaag

SEQ ID NO: 1929 - RNA, 20 nt, Artificial Sequence
  synthesized
cuuucucucucucucucucu

SEQ ID NO: 1930 - RNA, 20 nt, Artificial Sequence
  synthesized
gagagagagagagagaaaga

SEQ ID NO: 1931 - RNA, 20 nt, Artificial Sequence
  synthesized
acaggggacucuuacccucc

SEQ ID NO: 1932 - RNA, 20 nt, Artificial Sequence
  synthesized
acaggggacucuuacccucu

SEQ ID NO: 1933 - RNA, 20 nt, Artificial Sequence
  synthesized
acucuuacccucugcucugg

SEQ ID NO: 1934 - RNA, 20 nt, Artificial Sequence
  synthesized
agagcagaggguaagagucc

SEQ ID NO: 1935 - RNA, 20 nt, Artificial Sequence
  synthesized
agagcggaggguaagagucc

SEQ ID NO: 1936 - RNA, 20 nt, Artificial Sequence
  synthesized
agaggguaagaguccccugu

SEQ ID NO: 1937 - RNA, 20 nt, Artificial Sequence
  synthesized
aggggacucuuacccuccgc

SEQ ID NO: 1938 - RNA, 20 nt, Artificial Sequence
  synthesized
aggggacucuuacccucugc

SEQ ID NO: 1939 - RNA, 20 nt, Artificial Sequence
  synthesized
cagagcagaggguaagaguc

SEQ ID NO: 1940 - RNA, 20 nt, Artificial Sequence
  synthesized
cagagcggaggguaagaguc

SEQ ID NO: 1941 - RNA, 20 nt, Artificial Sequence
  synthesized
cagaggguaagaguccccug

SEQ ID NO: 1942 - RNA, 20 nt, Artificial Sequence
  synthesized
caggggacucuuacccuccg

SEQ ID NO: 1943 - RNA, 20 nt, Artificial Sequence
  synthesized
caggggacucuuacccucug

SEQ ID NO: 1944 - RNA, 20 nt, Artificial Sequence
  synthesized
ccagagcagaggguaagagu

SEQ ID NO: 1945 - RNA, 20 nt, Artificial Sequence
  synthesized
ccagagcggaggguaagagu

SEQ ID NO: 1946 - RNA, 20 nt, Artificial Sequence
  synthesized
cccagagcagaggguaagag

SEQ ID NO: 1947 - RNA, 20 nt, Artificial Sequence
  synthesized
ccucccagagcagaggguaa

SEQ ID NO: 1948 - RNA, 20 nt, Artificial Sequence
  synthesized
cggaggguaagaguccccug

SEQ ID NO: 1949 - RNA, 20 nt, Artificial Sequence
  synthesized
cucccagagcagaggguaag

SEQ ID NO: 1950 - RNA, 20 nt, Artificial Sequence
  synthesized
cucugcucugggaggcuccg

SEQ ID NO: 1951 - RNA, 20 nt, Artificial Sequence
  synthesized
cugcucugggaggcuccggu

SEQ ID NO: 1952 - RNA, 20 nt, Artificial Sequence
  synthesized
cuuacccucugcucugggag

SEQ ID NO: 1953 - RNA, 20 nt, Artificial Sequence
  synthesized
gagcagaggguaagaguccc

SEQ ID NO: 1954 - RNA, 20 nt, Artificial Sequence
  synthesized
gagccucccagagcagaggg

SEQ ID NO: 1955 - RNA, 20 nt, Artificial Sequence
  synthesized
gagcggaggguaagaguccc

SEQ ID NO: 1956 - RNA, 20 nt, Artificial Sequence
  synthesized
gcagaggguaagaguccccu

SEQ ID NO: 1957 - RNA, 20 nt, Artificial Sequence
  synthesized
gcggaggguaagaguccccu

SEQ ID NO: 1958 - RNA, 20 nt, Artificial Sequence
  synthesized
ggagccucccagagcagagg

SEQ ID NO: 1959 - RNA, 20 nt, Artificial Sequence
  synthesized
ggaggguaagaguccccugu

SEQ ID NO: 1960 - RNA, 20 nt, Artificial Sequence
  synthesized
ggggacucuuacccuccgcu

SEQ ID NO: 1961 - RNA, 20 nt, Artificial Sequence
  synthesized
ggggacucuuacccucugcu

SEQ ID NO: 1962 - RNA, 20 nt, Artificial Sequence
  synthesized
ucccagagcagaggguaaga

SEQ ID NO: 1963 - RNA, 20 nt, Artificial Sequence
  synthesized
ucuuacccucugcucuggga

SEQ ID NO: 1964 - RNA, 20 nt, Artificial Sequence
  synthesized
ugcucugggaggcuccggua

SEQ ID NO: 1965 - RNA, 20 nt, Artificial Sequence
  synthesized
uuacccucugcucugggagg

SEQ ID NO: 1966 - RNA, 20 nt, Artificial Sequence
  synthesized
aaugcaucaccaugaucacu

SEQ ID NO: 1967 - RNA, 20 nt, Artificial Sequence
  synthesized
acccagcagcaccgaaugca

SEQ ID NO: 1968 - RNA, 20 nt, Artificial Sequence
  synthesized
acccagcagcaccgagugca

SEQ ID NO: 1969 - RNA, 20 nt, Artificial Sequence
  synthesized
accgaaugcaucaccaugau

SEQ ID NO: 1970 - RNA, 20 nt, Artificial Sequence
  synthesized
accgagugcaucaccaugau

SEQ ID NO: 1971 - RNA, 20 nt, Artificial Sequence
  synthesized
acucggugcugcuggguggc

SEQ ID NO: 1972 - RNA, 20 nt, Artificial Sequence
  synthesized
agcaccgaaugcaucaccau

SEQ ID NO: 1973 - RNA, 20 nt, Artificial Sequence
  synthesized
agcaccgagugcaucaccau

SEQ ID NO: 1974 - RNA, 20 nt, Artificial Sequence
  synthesized
agugcaucaccaugaucacu

SEQ ID NO: 1975 - RNA, 20 nt, Artificial Sequence
  synthesized
aucauggugaugcacucggu

SEQ ID NO: 1976 - RNA, 20 nt, Artificial Sequence
  synthesized
aucauggugaugcauucggu

SEQ ID NO: 1977 - RNA, 20 nt, Artificial Sequence
  synthesized
augcaucaccaugaucacug

SEQ ID NO: 1978 - RNA, 20 nt, Artificial Sequence
  synthesized
auggugaugcacucggugcu

SEQ ID NO: 1979 - RNA, 20 nt, Artificial Sequence
  synthesized
auggugaugcauucggugcu

SEQ ID NO: 1980 - RNA, 20 nt, Artificial Sequence
  synthesized
auucggugcugcuggguggc

SEQ ID NO: 1981 - RNA, 20 nt, Artificial Sequence
  synthesized
cacccagcagcaccgaaugc

SEQ ID NO: 1982 - RNA, 20 nt, Artificial Sequence
  synthesized
cacccagcagcaccgagugc

SEQ ID NO: 1983 - RNA, 20 nt, Artificial Sequence
  synthesized
caccgaaugcaucaccauga

SEQ ID NO: 1984 - RNA, 20 nt, Artificial Sequence
  synthesized
caccgagugcaucaccauga

SEQ ID NO: 1985 - RNA, 20 nt, Artificial Sequence
  synthesized
cagcagcaccgaaugcauca

SEQ ID NO: 1986 - RNA, 20 nt, Artificial Sequence
  synthesized
cagcagcaccgagugcauca

SEQ ID NO: 1987 - RNA, 20 nt, Artificial Sequence
  synthesized
cagugaucauggugaugcac

SEQ ID NO: 1988 - RNA, 20 nt, Artificial Sequence
  synthesized
cagugaucauggugaugcau

SEQ ID NO: 1989 - RNA, 20 nt, Artificial Sequence
  synthesized
cauggugaugcacucggugc

SEQ ID NO: 1990 - RNA, 20 nt, Artificial Sequence
  synthesized
cauggugaugcauucggugc

SEQ ID NO: 1991 - RNA, 20 nt, Artificial Sequence
  synthesized
ccagcagcaccgaaugcauc

SEQ ID NO: 1992 - RNA, 20 nt, Artificial Sequence
  synthesized
ccagcagcaccgagugcauc

SEQ ID NO: 1993 - RNA, 20 nt, Artificial Sequence
  synthesized
cccagcagcaccgaaugcau

SEQ ID NO: 1994 - RNA, 20 nt, Artificial Sequence
  synthesized
cccagcagcaccgagugcau

SEQ ID NO: 1995 - RNA, 20 nt, Artificial Sequence
  synthesized
ccgaaugcaucaccaugauc

SEQ ID NO: 1996 - RNA, 20 nt, Artificial Sequence
  synthesized
ccgagugcaucaccaugauc

SEQ ID NO: 1997 - RNA, 20 nt, Artificial Sequence
  synthesized
cgaaugcaucaccaugauca

SEQ ID NO: 1998 - RNA, 20 nt, Artificial Sequence
  synthesized
cgagugcaucaccaugauca

SEQ ID NO: 1999 - RNA, 20 nt, Artificial Sequence
  synthesized
cgccacccagcagcaccgaa

SEQ ID NO: 2000 - RNA, 20 nt, Artificial Sequence
  synthesized
cgccacccagcagcaccgag

SEQ ID NO: 2001 - RNA, 20 nt, Artificial Sequence
  synthesized
gaaugcaucaccaugaucac

SEQ ID NO: 2002 - RNA, 20 nt, Artificial Sequence
  synthesized
gagugcaucaccaugaucac

SEQ ID NO: 2003 - RNA, 20 nt, Artificial Sequence
  synthesized
gaucauggugaugcacucgg

SEQ ID NO: 2004 - RNA, 20 nt, Artificial Sequence
  synthesized
gaucauggugaugcauucgg

SEQ ID NO: 2005 - RNA, 20 nt, Artificial Sequence
  synthesized
gaugcacucggugcugcugg

SEQ ID NO: 2006 - RNA, 20 nt, Artificial Sequence
  synthesized
gaugcauucggugcugcugg

SEQ ID NO: 2007 - RNA, 20 nt, Artificial Sequence
  synthesized
gcaccgaaugcaucaccaug

SEQ ID NO: 2008 - RNA, 20 nt, Artificial Sequence
  synthesized
gcaccgagugcaucaccaug

SEQ ID NO: 2009 - RNA, 20 nt, Artificial Sequence
  synthesized
gcacucggugcugcugggug

SEQ ID NO: 2010 - RNA, 20 nt, Artificial Sequence
  synthesized
gcagcaccgaaugcaucacc

SEQ ID NO: 2011 - RNA, 20 nt, Artificial Sequence
  synthesized
gcagcaccgagugcaucacc

SEQ ID NO: 2012 - RNA, 20 nt, Artificial Sequence
  synthesized
gcauucggugcugcugggug

SEQ ID NO: 2013 - RNA, 20 nt, Artificial Sequence
  synthesized
gccacccagcagcaccgaau

SEQ ID NO: 2014 - RNA, 20 nt, Artificial Sequence
  synthesized
gccacccagcagcaccgagu

SEQ ID NO: 2015 - RNA, 20 nt, Artificial Sequence
  synthesized
gugcaucaccaugaucacug

SEQ ID NO: 2016 - RNA, 20 nt, Artificial Sequence
  synthesized
ucauggugaugcacucggug

SEQ ID NO: 2017 - RNA, 20 nt, Artificial Sequence
  synthesized
ucauggugaugcauucggug

SEQ ID NO: 2018 - RNA, 20 nt, Artificial Sequence
  synthesized
ugaucauggugaugcacucg

SEQ ID NO: 2019 - RNA, 20 nt, Artificial Sequence
  synthesized
ugaucauggugaugcauucg

SEQ ID NO: 2020 - RNA, 20 nt, Artificial Sequence
  synthesized
uggugaugcacucggugcug

SEQ ID NO: 2021 - RNA, 20 nt, Artificial Sequence
  synthesized
uggugaugcauucggugcug

SEQ ID NO: 2022 - RNA, 20 nt, Artificial Sequence
  synthesized
aaaaggugaucgaguucauu

SEQ ID NO: 2023 - RNA, 20 nt, Artificial Sequence
  synthesized
aaaggugaucgaguucauua

SEQ ID NO: 2024 - RNA, 20 nt, Artificial Sequence
  synthesized
aaauggugaucgaguucauu

SEQ ID NO: 2025 - RNA, 20 nt, Artificial Sequence
  synthesized
aacaccugguauuaaaaggu

SEQ ID NO: 2026 - RNA, 20 nt, Artificial Sequence
  synthesized
aacaccugguauuaaauggu

SEQ ID NO: 2027 - RNA, 20 nt, Artificial Sequence
  synthesized
aaggugaucgaguucauuaa

SEQ ID NO: 2028 - RNA, 20 nt, Artificial Sequence
  synthesized
aaugaacucgaucaccauuu

SEQ ID NO: 2029 - RNA, 20 nt, Artificial Sequence
  synthesized
aauggugaucgaguucauua

SEQ ID NO: 2030 - RNA, 20 nt, Artificial Sequence
  synthesized
acaccugguauuaaaaggug

SEQ ID NO: 2031 - RNA, 20 nt, Artificial Sequence
  synthesized
acaccugguauuaaauggug

SEQ ID NO: 2032 - RNA, 20 nt, Artificial Sequence
  synthesized
accauuuaauaccagguguu

SEQ ID NO: 2033 - RNA, 20 nt, Artificial Sequence
  synthesized
acucgaucaccauuuaauac

SEQ ID NO: 2034 - RNA, 20 nt, Artificial Sequence
  synthesized
aucaccauuuaauaccaggu

SEQ ID NO: 2035 - RNA, 20 nt, Artificial Sequence
  synthesized
augaacucgaucaccauuua

SEQ ID NO: 2036 - RNA, 20 nt, Artificial Sequence
  synthesized
auggugaucgaguucauuaa

SEQ ID NO: 2037 - RNA, 20 nt, Artificial Sequence
  synthesized
caccauuuaauaccaggugu

SEQ ID NO: 2038 - RNA, 20 nt, Artificial Sequence
  synthesized
caccugguauuaaaagguga

SEQ ID NO: 2039 - RNA, 20 nt, Artificial Sequence
  synthesized
caccugguauuaaaugguga

SEQ ID NO: 2040 - RNA, 20 nt, Artificial Sequence
  synthesized
ccauuuaauaccagguguuu

SEQ ID NO: 2041 - RNA, 20 nt, Artificial Sequence
  synthesized
ccugguauuaaaaggugauc

SEQ ID NO: 2042 - RNA, 20 nt, Artificial Sequence
  synthesized
ccugguauuaaauggugauc

SEQ ID NO: 2043 - RNA, 20 nt, Artificial Sequence
  synthesized
cgaucaccauuuaauaccag

SEQ ID NO: 2044 - RNA, 20 nt, Artificial Sequence
  synthesized
cugguauuaaaaggugaucg

SEQ ID NO: 2045 - RNA, 20 nt, Artificial Sequence
  synthesized
cugguauuaaauggugaucg

SEQ ID NO: 2046 - RNA, 20 nt, Artificial Sequence
  synthesized
gaacucgaucaccauuuaau

SEQ ID NO: 2047 - RNA, 20 nt, Artificial Sequence
  synthesized
gaucaccauuuaauaccagg

SEQ ID NO: 2048 - RNA, 20 nt, Artificial Sequence
  synthesized
gguauuaaaaggugaucgag

SEQ ID NO: 2049 - RNA, 20 nt, Artificial Sequence
  synthesized
gguauuaaauggugaucgag

SEQ ID NO: 2050 - RNA, 20 nt, Artificial Sequence
  synthesized
guauuaaaaggugaucgagu

SEQ ID NO: 2051 - RNA, 20 nt, Artificial Sequence
  synthesized
guauuaaauggugaucgagu

SEQ ID NO: 2052 - RNA, 20 nt, Artificial Sequence
  synthesized
uaaaaggugaucgaguucau

SEQ ID NO: 2053 - RNA, 20 nt, Artificial Sequence
  synthesized
uaaauggugaucgaguucau

SEQ ID NO: 2054 - RNA, 20 nt, Artificial Sequence
  synthesized
uaaugaacucgaucaccauu

SEQ ID NO: 2055 - RNA, 20 nt, Artificial Sequence
  synthesized
uaaugaacucgaucaccuuu

SEQ ID NO: 2056 - RNA, 20 nt, Artificial Sequence
  synthesized
ugaacucgaucaccauuuaa

SEQ ID NO: 2057 - RNA, 20 nt, Artificial Sequence
  synthesized
ugguauuaaaaggugaucga

SEQ ID NO: 2058 - RNA, 20 nt, Artificial Sequence
  synthesized
ugguauuaaauggugaucga

SEQ ID NO: 2059 - RNA, 20 nt, Artificial Sequence
  synthesized
agugagacucagaaaaaaag

SEQ ID NO: 2060 - RNA, 20 nt, Artificial Sequence
  synthesized
gacaaagugagacucagaaa

SEQ ID NO: 2061 - RNA, 20 nt, Artificial Sequence
  synthesized
uucugagucucacuuuguca

SEQ ID NO: 2062 - RNA, 20 nt, Artificial Sequence
  synthesized
ucuucuucuuucauaccuca

SEQ ID NO: 2063 - RNA, 20 nt, Artificial Sequence
  synthesized
accacgcgggaccgcagagc

SEQ ID NO: 2064 - RNA, 20 nt, Artificial Sequence
  synthesized
accgcgcgggaccgcagagc

SEQ ID NO: 2065 - RNA, 20 nt, Artificial Sequence
  synthesized
acggagcccaccacgcggga

SEQ ID NO: 2066 - RNA, 20 nt, Artificial Sequence
  synthesized
acggagcccaccgcgcggga

SEQ ID NO: 2067 - RNA, 20 nt, Artificial Sequence
  synthesized
caccacgcgggaccgcagag

SEQ ID NO: 2068 - RNA, 20 nt, Artificial Sequence
  synthesized
caccgcgcgggaccgcagag

SEQ ID NO: 2069 - RNA, 20 nt, Artificial Sequence
  synthesized
ccaccacgcgggaccgcaga

SEQ ID NO: 2070 - RNA, 20 nt, Artificial Sequence
  synthesized
ccaccgcgcgggaccgcaga

SEQ ID NO: 2071 - RNA, 20 nt, Artificial Sequence
  synthesized
cccaccacgcgggaccgcag

SEQ ID NO: 2072 - RNA, 20 nt, Artificial Sequence
  synthesized
cccaccgcgcgggaccgcag

SEQ ID NO: 2073 - RNA, 20 nt, Artificial Sequence
  synthesized
cccgcgcggugggcuccguc

SEQ ID NO: 2074 - RNA, 20 nt, Artificial Sequence
  synthesized
cccgcguggugggcuccguc

SEQ ID NO: 2075 - RNA, 20 nt, Artificial Sequence
  synthesized
ccgcgcggugggcuccgucc

SEQ ID NO: 2076 - RNA, 20 nt, Artificial Sequence
  synthesized
ccgcguggugggcuccgucc

SEQ ID NO: 2077 - RNA, 20 nt, Artificial Sequence
  synthesized
cgcguggugggcuccguccc

SEQ ID NO: 2078 - RNA, 20 nt, Artificial Sequence
  synthesized
cggagcccaccacgcgggac

SEQ ID NO: 2079 - RNA, 20 nt, Artificial Sequence
  synthesized
cggagcccaccgcgcgggac

SEQ ID NO: 2080 - RNA, 20 nt, Artificial Sequence
  synthesized
cggucccgcgcggugggcuc

SEQ ID NO: 2081 - RNA, 20 nt, Artificial Sequence
  synthesized
cggucccgcguggugggcuc

SEQ ID NO: 2082 - RNA, 20 nt, Artificial Sequence
  synthesized
cggugggcuccgucccugcc

SEQ ID NO: 2083 - RNA, 20 nt, Artificial Sequence
  synthesized
cucugcggucccgcgcggug

SEQ ID NO: 2084 - RNA, 20 nt, Artificial Sequence
  synthesized
cucugcggucccgcguggug

SEQ ID NO: 2085 - RNA, 20 nt, Artificial Sequence
  synthesized
gacggagcccaccacgcggg

SEQ ID NO: 2086 - RNA, 20 nt, Artificial Sequence
  synthesized
gacggagcccaccgcgcggg

SEQ ID NO: 2087 - RNA, 20 nt, Artificial Sequence
  synthesized
gcagggacggagcccaccac

SEQ ID NO: 2088 - RNA, 20 nt, Artificial Sequence
  synthesized
gcagggacggagcccaccgc

SEQ ID NO: 2089 - RNA, 20 nt, Artificial Sequence
  synthesized
gcccaccacgcgggaccgca

SEQ ID NO: 2090 - RNA, 20 nt, Artificial Sequence
  synthesized
gcccaccgcgcgggaccgca

SEQ ID NO: 2091 - RNA, 20 nt, Artificial Sequence
  synthesized
gcgcggugggcuccgucccu

SEQ ID NO: 2092 - RNA, 20 nt, Artificial Sequence
  synthesized
gcggucccgcgcggugggcu

SEQ ID NO: 2093 - RNA, 20 nt, Artificial Sequence
  synthesized
gcggucccgcguggugggcu

SEQ ID NO: 2094 - RNA, 20 nt, Artificial Sequence
  synthesized
gcggugggcuccgucccugc

SEQ ID NO: 2095 - RNA, 20 nt, Artificial Sequence
  synthesized
gcguggugggcuccgucccu

SEQ ID NO: 2096 - RNA, 20 nt, Artificial Sequence
  synthesized
ggagcccaccacgcgggacc

SEQ ID NO: 2097 - RNA, 20 nt, Artificial Sequence
  synthesized
ggagcccaccgcgcgggacc

SEQ ID NO: 2098 - RNA, 20 nt, Artificial Sequence
  synthesized
gggcucugcggucccgcgcg

SEQ ID NO: 2099 - RNA, 20 nt, Artificial Sequence
  synthesized
gggcucugcggucccgcgug

SEQ ID NO: 2100 - RNA, 20 nt, Artificial Sequence
  synthesized
ggucccgcgcggugggcucc

SEQ ID NO: 2101 - RNA, 20 nt, Artificial Sequence
  synthesized
ggucccgcguggugggcucc

SEQ ID NO: 2102 - RNA, 20 nt, Artificial Sequence
  synthesized
gucccgcgcggugggcuccg

SEQ ID NO: 2103 - RNA, 20 nt, Artificial Sequence
  synthesized
gucccgcguggugggcuccg

SEQ ID NO: 2104 - RNA, 20 nt, Artificial Sequence
  synthesized
guggugggcuccgucccugc

SEQ ID NO: 2105 - RNA, 20 nt, Artificial Sequence
  synthesized
ucccgcgcggugggcuccgu

SEQ ID NO: 2106 - RNA, 20 nt, Artificial Sequence
  synthesized
ucccgcguggugggcuccgu

SEQ ID NO: 2107 - RNA, 20 nt, Artificial Sequence
  synthesized
ucugcggucccgcgcggugg

SEQ ID NO: 2108 - RNA, 20 nt, Artificial Sequence
  synthesized
ucugcggucccgcguggugg

SEQ ID NO: 2109 - RNA, 20 nt, Artificial Sequence
  synthesized
ugcggucccgcgcggugggc

SEQ ID NO: 2110 - RNA, 20 nt, Artificial Sequence
  synthesized
ugcggucccgcguggugggc

SEQ ID NO: 2111 - RNA, 20 nt, Artificial Sequence
  synthesized
uggugggcuccgucccugcc

SEQ ID NO: 2112 - RNA, 20 nt, Artificial Sequence
  synthesized
acccuaaggagaagaacaaa

SEQ ID NO: 2113 - RNA, 20 nt, Artificial Sequence
  synthesized
agacccuaaggagaagaaca

SEQ ID NO: 2114 - RNA, 20 nt, Artificial Sequence
  synthesized
cagacccuaaggagaagaac

SEQ ID NO: 2115 - RNA, 20 nt, Artificial Sequence
  synthesized
ccagacccuaaggagaagaa

SEQ ID NO: 2116 - RNA, 20 nt, Artificial Sequence
  synthesized
cccagacccuaaggagaaga

SEQ ID NO: 2117 - RNA, 20 nt, Artificial Sequence
  synthesized
cccuaaggagaagaacaaaa

SEQ ID NO: 2118 - RNA, 20 nt, Artificial Sequence
  synthesized
ccuaaggagaagaacaaaaa

SEQ ID NO: 2119 - RNA, 20 nt, Artificial Sequence
  synthesized
gacccuaaggagaagaacaa

SEQ ID NO: 2120 - RNA, 20 nt, Artificial Sequence
  synthesized
guucuucuccuuagggucug

SEQ ID NO: 2121 - RNA, 20 nt, Artificial Sequence
  synthesized
ucuucuccuuagggucuggg

SEQ ID NO: 2122 - RNA, 20 nt, Artificial Sequence
  synthesized
uucuucuccuuagggucugg

SEQ ID NO: 2123 - RNA, 20 nt, Artificial Sequence
  synthesized
accuggaggccacucuaccu

SEQ ID NO: 2124 - RNA, 20 nt, Artificial Sequence
  synthesized
accugggggccacucuaccu

SEQ ID NO: 2125 - RNA, 20 nt, Artificial Sequence
  synthesized
agaguggcccccaggugacc

SEQ ID NO: 2126 - RNA, 20 nt, Artificial Sequence
  synthesized
agaguggccuccaggugacc

SEQ ID NO: 2127 - RNA, 20 nt, Artificial Sequence
  synthesized
aggcagugaggucaccugga

SEQ ID NO: 2128 - RNA, 20 nt, Artificial Sequence
  synthesized
aggcagugaggucaccuggg

SEQ ID NO: 2129 - RNA, 20 nt, Artificial Sequence
  synthesized
aggccacucuaccuggcugg

SEQ ID NO: 2130 - RNA, 20 nt, Artificial Sequence
  synthesized
agguagaguggcccccaggu

SEQ ID NO: 2131 - RNA, 20 nt, Artificial Sequence
  synthesized
aggucaccuggaggccacuc

SEQ ID NO: 2132 - RNA, 20 nt, Artificial Sequence
  synthesized
aggucaccugggggccacuc

SEQ ID NO: 2133 - RNA, 20 nt, Artificial Sequence
  synthesized
agugaggucaccuggaggcc

SEQ ID NO: 2134 - RNA, 20 nt, Artificial Sequence
  synthesized
agugaggucaccugggggcc

SEQ ID NO: 2135 - RNA, 20 nt, Artificial Sequence
  synthesized
aguggcccccaggugaccuc

SEQ ID NO: 2136 - RNA, 20 nt, Artificial Sequence
  synthesized
aguggccuccaggugaccuc

SEQ ID NO: 2137 - RNA, 20 nt, Artificial Sequence
  synthesized
cagccagguagaguggcccc

SEQ ID NO: 2138 - RNA, 20 nt, Artificial Sequence
  synthesized
cagccagguagaguggccuc

SEQ ID NO: 2139 - RNA, 20 nt, Artificial Sequence
  synthesized
cagugaggucaccuggaggc

SEQ ID NO: 2140 - RNA, 20 nt, Artificial Sequence
  synthesized
cagugaggucaccugggggc

SEQ ID NO: 2141 - RNA, 20 nt, Artificial Sequence
  synthesized
ccagccagguagaguggccu

SEQ ID NO: 2142 - RNA, 20 nt, Artificial Sequence
  synthesized
ccagguagaguggcccccag

SEQ ID NO: 2143 - RNA, 20 nt, Artificial Sequence
  synthesized
ccagguagaguggccuccag

SEQ ID NO: 2144 - RNA, 20 nt, Artificial Sequence
  synthesized
ccuccaggugaccucacugc

SEQ ID NO: 2145 - RNA, 20 nt, Artificial Sequence
  synthesized
ccuggaggccacucuaccug

SEQ ID NO: 2146 - RNA, 20 nt, Artificial Sequence
  synthesized
ccugggggccacucuaccug

SEQ ID NO: 2147 - RNA, 20 nt, Artificial Sequence
  synthesized
cuggaggccacucuaccugg

SEQ ID NO: 2148 - RNA, 20 nt, Artificial Sequence
  synthesized
gaggccacucuaccuggcug

SEQ ID NO: 2149 - RNA, 20 nt, Artificial Sequence
  synthesized
gaggucaccuggaggccacu

SEQ ID NO: 2150 - RNA, 20 nt, Artificial Sequence
  synthesized
gaggucaccugggggccacu

SEQ ID NO: 2151 - RNA, 20 nt, Artificial Sequence
  synthesized
gaguggcccccaggugaccu

SEQ ID NO: 2152 - RNA, 20 nt, Artificial Sequence
  synthesized
gaguggccuccaggugaccu

SEQ ID NO: 2153 - RNA, 20 nt, Artificial Sequence
  synthesized
gcagugaggucaccuggagg

SEQ ID NO: 2154 - RNA, 20 nt, Artificial Sequence
  synthesized
gcagugaggucaccuggggg

SEQ ID NO: 2155 - RNA, 20 nt, Artificial Sequence
  synthesized
gcccagccagguagaguggc

SEQ ID NO: 2156 - RNA, 20 nt, Artificial Sequence
  synthesized
gccuccaggugaccucacug

SEQ ID NO: 2157 - RNA, 20 nt, Artificial Sequence
  synthesized
ggcagugaggucaccuggag

SEQ ID NO: 2158 - RNA, 20 nt, Artificial Sequence
  synthesized
ggcagugaggucaccugggg

SEQ ID NO: 2159 - RNA, 20 nt, Artificial Sequence
  synthesized
ggcccccaggugaccucacu

SEQ ID NO: 2160 - RNA, 20 nt, Artificial Sequence
  synthesized
ggccuccaggugaccucacu

SEQ ID NO: 2161 - RNA, 20 nt, Artificial Sequence
  synthesized
ggggccacucuaccuggcug

SEQ ID NO: 2162 - RNA, 20 nt, Artificial Sequence
  synthesized
gguagaguggcccccaggug

SEQ ID NO: 2163 - RNA, 20 nt, Artificial Sequence
  synthesized
gguagaguggccuccaggug

SEQ ID NO: 2164 - RNA, 20 nt, Artificial Sequence
  synthesized
ggucaccugggggccacucu

SEQ ID NO: 2165 - RNA, 20 nt, Artificial Sequence
  synthesized
guagaguggcccccagguga

SEQ ID NO: 2166 - RNA, 20 nt, Artificial Sequence
  synthesized
guagaguggccuccagguga

SEQ ID NO: 2167 - RNA, 20 nt, Artificial Sequence
  synthesized
gucaccugggggccacucua

SEQ ID NO: 2168 - RNA, 20 nt, Artificial Sequence
  synthesized
gugaggucaccuggaggcca

SEQ ID NO: 2169 - RNA, 20 nt, Artificial Sequence
  synthesized
gugaggucaccugggggcca

SEQ ID NO: 2170 - RNA, 20 nt, Artificial Sequence
  synthesized
guggcccccaggugaccuca

SEQ ID NO: 2171 - RNA, 20 nt, Artificial Sequence
  synthesized
guggccuccaggugaccuca

SEQ ID NO: 2172 - RNA, 20 nt, Artificial Sequence
  synthesized
uagaguggcccccaggugac

SEQ ID NO: 2173 - RNA, 20 nt, Artificial Sequence
  synthesized
uagaguggccuccaggugac

SEQ ID NO: 2174 - RNA, 20 nt, Artificial Sequence
  synthesized
ucaccuggaggccacucuac

SEQ ID NO: 2175 - RNA, 20 nt, Artificial Sequence
  synthesized
ucaccugggggccacucuac

SEQ ID NO: 2176 - RNA, 20 nt, Artificial Sequence
  synthesized
uccaggugaccucacugccu

SEQ ID NO: 2177 - RNA, 20 nt, Artificial Sequence
  synthesized
ugaggucaccuggaggccac

SEQ ID NO: 2178 - RNA, 20 nt, Artificial Sequence
  synthesized
ugaggucaccugggggccac

SEQ ID NO: 2179 - RNA, 20 nt, Artificial Sequence
  synthesized
uggcccccaggugaccucac

SEQ ID NO: 2180 - RNA, 20 nt, Artificial Sequence
  synthesized
uggccuccaggugaccucac

SEQ ID NO: 2181 - RNA, 20 nt, Artificial Sequence
  synthesized
acccuaaggagaaacacaaa

SEQ ID NO: 2182 - RNA, 20 nt, Artificial Sequence
  synthesized
agacccuaaggagaaacaca

SEQ ID NO: 2183 - RNA, 20 nt, Artificial Sequence
  synthesized
cagacccuaaggagaaacac

SEQ ID NO: 2184 - RNA, 20 nt, Artificial Sequence
  synthesized
ccagacccuaaggagaaaca

SEQ ID NO: 2185 - RNA, 20 nt, Artificial Sequence
  synthesized
cccagacccuaaggagaaac

SEQ ID NO: 2186 - RNA, 20 nt, Artificial Sequence
  synthesized
cccuaaggagaaacacaaaa

SEQ ID NO: 2187 - RNA, 20 nt, Artificial Sequence
  synthesized
ccuaaggagaaacacaaaaa

SEQ ID NO: 2188 - RNA, 20 nt, Artificial Sequence
  synthesized
gacccuaaggagaaacacaa

SEQ ID NO: 2189 - RNA, 20 nt, Artificial Sequence
  synthesized
gcccagacccuaaggagaaa

SEQ ID NO: 2190 - RNA, 20 nt, Artificial Sequence
  synthesized
guguuucuccuuagggucug

SEQ ID NO: 2191 - RNA, 20 nt, Artificial Sequence
  synthesized
guuucuccuuagggucuggg

SEQ ID NO: 2192 - RNA, 20 nt, Artificial Sequence
  synthesized
uguuucuccuuagggucugg

SEQ ID NO: 2193 - RNA, 20 nt, Artificial Sequence
  synthesized
uuucuccuuagggucugggc

SEQ ID NO: 2194 - RNA, 20 nt, Artificial Sequence
  synthesized
aagagaguagaaauuuggag

SEQ ID NO: 2195 - RNA, 20 nt, Artificial Sequence
  synthesized
aagcccaggagcuccaaauu

SEQ ID NO: 2196 - RNA, 20 nt, Artificial Sequence
  synthesized
aagcccaggagcucuaaauu

SEQ ID NO: 2197 - RNA, 20 nt, Artificial Sequence
  synthesized
aauuuagagcuccugggcuu

SEQ ID NO: 2198 - RNA, 20 nt, Artificial Sequence
  synthesized
aauuuggagcuccugggcuu

SEQ ID NO: 2199 - RNA, 20 nt, Artificial Sequence
  synthesized
accugaagcccaggagcucc

SEQ ID NO: 2200 - RNA, 20 nt, Artificial Sequence
  synthesized
accugaagcccaggagcucu

SEQ ID NO: 2201 - RNA, 20 nt, Artificial Sequence
  synthesized
agaaauuuagagcuccuggg

SEQ ID NO: 2202 - RNA, 20 nt, Artificial Sequence
  synthesized
agagaguagaaauuuagagc

SEQ ID NO: 2203 - RNA, 20 nt, Artificial Sequence
  synthesized
agagaguagaaauuuggagc

SEQ ID NO: 2204 - RNA, 20 nt, Artificial Sequence
  synthesized
agagcuccugggcuucaggu

SEQ ID NO: 2205 - RNA, 20 nt, Artificial Sequence
  synthesized
agaguagaaauuuagagcuc

SEQ ID NO: 2206 - RNA, 20 nt, Artificial Sequence
  synthesized
agaguagaaauuuggagcuc

SEQ ID NO: 2207 - RNA, 20 nt, Artificial Sequence
  synthesized
agcccaggagcuccaaauuu

SEQ ID NO: 2208 - RNA, 20 nt, Artificial Sequence
  synthesized
agcccaggagcucuaaauuu

SEQ ID NO: 2209 - RNA, 20 nt, Artificial Sequence
  synthesized
aggagcuccaaauuucuacu

SEQ ID NO: 2210 - RNA, 20 nt, Artificial Sequence
  synthesized
aggagcucuaaauuucuacu

SEQ ID NO: 2211 - RNA, 20 nt, Artificial Sequence
  synthesized
caggagcuccaaauuucuac

SEQ ID NO: 2212 - RNA, 20 nt, Artificial Sequence
  synthesized
caggagcucuaaauuucuac

SEQ ID NO: 2213 - RNA, 20 nt, Artificial Sequence
  synthesized
ccaaauuucuacucucuuga

SEQ ID NO: 2214 - RNA, 20 nt, Artificial Sequence
  synthesized
ccaggagcuccaaauuucua

SEQ ID NO: 2215 - RNA, 20 nt, Artificial Sequence
  synthesized
ccaggagcucuaaauuucua

SEQ ID NO: 2216 - RNA, 20 nt, Artificial Sequence
  synthesized
cccaggagcuccaaauuucu

SEQ ID NO: 2217 - RNA, 20 nt, Artificial Sequence
  synthesized
cccaggagcucuaaauuucu

SEQ ID NO: 2218 - RNA, 20 nt, Artificial Sequence
  synthesized
ccugaagcccaggagcucca

SEQ ID NO: 2219 - RNA, 20 nt, Artificial Sequence
  synthesized
ccugaagcccaggagcucua

SEQ ID NO: 2220 - RNA, 20 nt, Artificial Sequence
  synthesized
cuccaaauuucuacucucuu

SEQ ID NO: 2221 - RNA, 20 nt, Artificial Sequence
  synthesized
cugaagcccaggagcuccaa

SEQ ID NO: 2222 - RNA, 20 nt, Artificial Sequence
  synthesized
cugaagcccaggagcucuaa

SEQ ID NO: 2223 - RNA, 20 nt, Artificial Sequence
  synthesized
gaaauuuagagcuccugggc

SEQ ID NO: 2224 - RNA, 20 nt, Artificial Sequence
  synthesized
gaaauuuggagcuccugggc

SEQ ID NO: 2225 - RNA, 20 nt, Artificial Sequence
  synthesized
gaagcccaggagcucuaaau

SEQ ID NO: 2226 - RNA, 20 nt, Artificial Sequence
  synthesized
gagaguagaaauuuagagcu

SEQ ID NO: 2227 - RNA, 20 nt, Artificial Sequence
  synthesized
gagaguagaaauuuggagcu

SEQ ID NO: 2228 - RNA, 20 nt, Artificial Sequence
  synthesized
gagcucuaaauuucuacucu

SEQ ID NO: 2229 - RNA, 20 nt, Artificial Sequence
  synthesized
gcccaggagcuccaaauuuc

SEQ ID NO: 2230 - RNA, 20 nt, Artificial Sequence
  synthesized
gcccaggagcucuaaauuuc

SEQ ID NO: 2231 - RNA, 20 nt, Artificial Sequence
  synthesized
ggagcuccugggcuucaggu

SEQ ID NO: 2232 - RNA, 20 nt, Artificial Sequence
  synthesized
guagaaauuuagagcuccug

SEQ ID NO: 2233 - RNA, 20 nt, Artificial Sequence
  synthesized
guagaaauuuggagcuccug

SEQ ID NO: 2234 - RNA, 20 nt, Artificial Sequence
  synthesized
uagaaauuuagagcuccugg

SEQ ID NO: 2235 - RNA, 20 nt, Artificial Sequence
  synthesized
uagaaauuuggagcuccugg

SEQ ID NO: 2236 - RNA, 20 nt, Artificial Sequence
  synthesized
uagagcuccugggcuucagg

SEQ ID NO: 2237 - RNA, 20 nt, Artificial Sequence
  synthesized
uccaaauuucuacucucuug

SEQ ID NO: 2238 - RNA, 20 nt, Artificial Sequence
  synthesized
ugaagcccaggagcuccaaa

SEQ ID NO: 2239 - RNA, 20 nt, Artificial Sequence
  synthesized
ugaagcccaggagcucuaaa

SEQ ID NO: 2240 - RNA, 20 nt, Artificial Sequence
  synthesized
uggagcuccugggcuucagg

SEQ ID NO: 2241 - RNA, 20 nt, Artificial Sequence
  synthesized
uuagagcuccugggcuucag

SEQ ID NO: 2242 - RNA, 20 nt, Artificial Sequence
  synthesized
uuggagcuccugggcuucag

SEQ ID NO: 2243 - RNA, 20 nt, Artificial Sequence
  synthesized
uuuagagcuccugggcuuca

SEQ ID NO: 2244 - RNA, 20 nt, Artificial Sequence
  synthesized
uuuggagcuccugggcuuca

SEQ ID NO: 2245 - RNA, 20 nt, Artificial Sequence
  synthesized
accccuccccccuccacugg

SEQ ID NO: 2246 - RNA, 20 nt, Artificial Sequence
  synthesized
acugcaccccuccccccucc

SEQ ID NO: 2247 - RNA, 20 nt, Artificial Sequence
  synthesized
acuggacaccuccaauccuc

SEQ ID NO: 2248 - RNA, 20 nt, Artificial Sequence
  synthesized
aggauuggagguguccaaug

SEQ ID NO: 2249 - RNA, 20 nt, Artificial Sequence
  synthesized
auggaggggggaggggugca

SEQ ID NO: 2250 - RNA, 20 nt, Artificial Sequence
  synthesized
caauggaggggggaggggug

SEQ ID NO: 2251 - RNA, 20 nt, Artificial Sequence
  synthesized
caccccuccccccuccauug

SEQ ID NO: 2252 - RNA, 20 nt, Artificial Sequence
  synthesized
cacuggacaccuccaauccu

SEQ ID NO: 2253 - RNA, 20 nt, Artificial Sequence
  synthesized
cauuggacaccuccaauccu

SEQ ID NO: 2254 - RNA, 20 nt, Artificial Sequence
  synthesized
ccaagaggauuggagguguc

SEQ ID NO: 2255 - RNA, 20 nt, Artificial Sequence
  synthesized
ccaauggaggggggaggggu

SEQ ID NO: 2256 - RNA, 20 nt, Artificial Sequence
  synthesized
ccacuggacaccuccaaucc

SEQ ID NO: 2257 - RNA, 20 nt, Artificial Sequence
  synthesized
ccauuggacaccuccaaucc

SEQ ID NO: 2258 - RNA, 20 nt, Artificial Sequence
  synthesized
ccccccuccacuggacaccu

SEQ ID NO: 2259 - RNA, 20 nt, Artificial Sequence
  synthesized
ccccccuccauuggacaccu

SEQ ID NO: 2260 - RNA, 20 nt, Artificial Sequence
  synthesized
cccccuccacuggacaccuc

SEQ ID NO: 2261 - RNA, 20 nt, Artificial Sequence
  synthesized
cccccuccauuggacaccuc

SEQ ID NO: 2262 - RNA, 20 nt, Artificial Sequence
  synthesized
ccccuccauuggacaccucc

SEQ ID NO: 2263 - RNA, 20 nt, Artificial Sequence
  synthesized
ccccuccccccuccacugga

SEQ ID NO: 2264 - RNA, 20 nt, Artificial Sequence
  synthesized
ccccuccccccuccauugga

SEQ ID NO: 2265 - RNA, 20 nt, Artificial Sequence
  synthesized
cccuccacuggacaccucca

SEQ ID NO: 2266 - RNA, 20 nt, Artificial Sequence
  synthesized
cccuccauuggacaccucca

SEQ ID NO: 2267 - RNA, 20 nt, Artificial Sequence
  synthesized
cccuccccccuccacuggac

SEQ ID NO: 2268 - RNA, 20 nt, Artificial Sequence
  synthesized
cccuccccccuccauuggac

SEQ ID NO: 2269 - RNA, 20 nt, Artificial Sequence
  synthesized
ccuccauuggacaccuccaa

SEQ ID NO: 2270 - RNA, 20 nt, Artificial Sequence
  synthesized
ccuccccccuccacuggaca

SEQ ID NO: 2271 - RNA, 20 nt, Artificial Sequence
  synthesized
ccuccccccuccauuggaca

SEQ ID NO: 2272 - RNA, 20 nt, Artificial Sequence
  synthesized
cuccacuggacaccuccaau

SEQ ID NO: 2273 - RNA, 20 nt, Artificial Sequence
  synthesized
cuccauuggacaccuccaau

SEQ ID NO: 2274 - RNA, 20 nt, Artificial Sequence
  synthesized
cuccccccuccacuggacac

SEQ ID NO: 2275 - RNA, 20 nt, Artificial Sequence
  synthesized
cuccccccuccauuggacac

SEQ ID NO: 2276 - RNA, 20 nt, Artificial Sequence
  synthesized
gagguguccaauggaggggg

SEQ ID NO: 2277 - RNA, 20 nt, Artificial Sequence
  synthesized
gagguguccaguggaggggg

SEQ ID NO: 2278 - RNA, 20 nt, Artificial Sequence
  synthesized
guccaauggaggggggaggg

SEQ ID NO: 2279 - RNA, 20 nt, Artificial Sequence
  synthesized
ucacugcaccccuccccccu

SEQ ID NO: 2280 - RNA, 20 nt, Artificial Sequence
  synthesized
uccaauggaggggggagggg

SEQ ID NO: 2281 - RNA, 20 nt, Artificial Sequence
  synthesized
uccacuggacaccuccaauc

SEQ ID NO: 2282 - RNA, 20 nt, Artificial Sequence
  synthesized
uccaguggaggggggagggg

SEQ ID NO: 2283 - RNA, 20 nt, Artificial Sequence
  synthesized
uccauuggacaccuccaauc

SEQ ID NO: 2284 - RNA, 20 nt, Artificial Sequence
  synthesized
aaugcugaggggcagggaca

SEQ ID NO: 2285 - RNA, 20 nt, Artificial Sequence
  synthesized
agagccucugucccugcccc

SEQ ID NO: 2286 - RNA, 20 nt, Artificial Sequence
  synthesized
agggacagaggcucugacca

SEQ ID NO: 2287 - RNA, 20 nt, Artificial Sequence
  synthesized
agggccagaggcucugacca

SEQ ID NO: 2288 - RNA, 20 nt, Artificial Sequence
  synthesized
ccucugucccugccccucag

SEQ ID NO: 2289 - RNA, 20 nt, Artificial Sequence
  synthesized
ccuggucagagccucuggcc

SEQ ID NO: 2290 - RNA, 20 nt, Artificial Sequence
  synthesized
ccuggucagagccucugucc

SEQ ID NO: 2291 - RNA, 20 nt, Artificial Sequence
  synthesized
cucugucccugccccucagc

SEQ ID NO: 2292 - RNA, 20 nt, Artificial Sequence
  synthesized
cugaggggcagggacagagg

SEQ ID NO: 2293 - RNA, 20 nt, Artificial Sequence
  synthesized
cuggucagagccucuggccc

SEQ ID NO: 2294 - RNA, 20 nt, Artificial Sequence
  synthesized
cuggucagagccucuguccc

SEQ ID NO: 2295 - RNA, 20 nt, Artificial Sequence
  synthesized
gaaaugcugaggggcaggga

SEQ ID NO: 2296 - RNA, 20 nt, Artificial Sequence
  synthesized
gaaaugcugaggggcagggc

SEQ ID NO: 2297 - RNA, 20 nt, Artificial Sequence
  synthesized
gagccucuggcccugccccu

SEQ ID NO: 2298 - RNA, 20 nt, Artificial Sequence
  synthesized
gagccucugucccugccccu

SEQ ID NO: 2299 - RNA, 20 nt, Artificial Sequence
  synthesized
gaggggcagggacagaggcu

SEQ ID NO: 2300 - RNA, 20 nt, Artificial Sequence
  synthesized
gaggggcagggccagaggcu

SEQ ID NO: 2301 - RNA, 20 nt, Artificial Sequence
  synthesized
gcagggacagaggcucugac

SEQ ID NO: 2302 - RNA, 20 nt, Artificial Sequence
  synthesized
gcagggccagaggcucugac

SEQ ID NO: 2303 - RNA, 20 nt, Artificial Sequence
  synthesized
gcccugccccucagcauuuc

SEQ ID NO: 2304 - RNA, 20 nt, Artificial Sequence
  synthesized
gccucugucccugccccuca

SEQ ID NO: 2305 - RNA, 20 nt, Artificial Sequence
  synthesized
gccuggucagagccucuggc

SEQ ID NO: 2306 - RNA, 20 nt, Artificial Sequence
  synthesized
gccuggucagagccucuguc

SEQ ID NO: 2307 - RNA, 20 nt, Artificial Sequence
  synthesized
gcugaggggcagggacagag

SEQ ID NO: 2308 - RNA, 20 nt, Artificial Sequence
  synthesized
gcugaggggcagggccagag

SEQ ID NO: 2309 - RNA, 20 nt, Artificial Sequence
  synthesized
ggaaaugcugaggggcaggg

SEQ ID NO: 2310 - RNA, 20 nt, Artificial Sequence
  synthesized
ggacagaggcucugaccagg

SEQ ID NO: 2311 - RNA, 20 nt, Artificial Sequence
  synthesized
ggccagaggcucugaccagg

SEQ ID NO: 2312 - RNA, 20 nt, Artificial Sequence
  synthesized
ggcccugccccucagcauuu

SEQ ID NO: 2313 - RNA, 20 nt, Artificial Sequence
  synthesized
ggccuggucagagccucugg

SEQ ID NO: 2314 - RNA, 20 nt, Artificial Sequence
  synthesized
ggccuggucagagccucugu

SEQ ID NO: 2315 - RNA, 20 nt, Artificial Sequence
  synthesized
gggacagaggcucugaccag

SEQ ID NO: 2316 - RNA, 20 nt, Artificial Sequence
  synthesized
gggcagggacagaggcucug

SEQ ID NO: 2317 - RNA, 20 nt, Artificial Sequence
  synthesized
gggcagggccagaggcucug

SEQ ID NO: 2318 - RNA, 20 nt, Artificial Sequence
  synthesized
gggccagaggcucugaccag

SEQ ID NO: 2319 - RNA, 20 nt, Artificial Sequence
  synthesized
ggggcagggacagaggcucu

SEQ ID NO: 2320 - RNA, 20 nt, Artificial Sequence
  synthesized
ggggcagggccagaggcucu

SEQ ID NO: 2321 - RNA, 20 nt, Artificial Sequence
  synthesized
ggucagagccucuggcccug

SEQ ID NO: 2322 - RNA, 20 nt, Artificial Sequence
  synthesized
ggucagagccucugucccug

SEQ ID NO: 2323 - RNA, 20 nt, Artificial Sequence
  synthesized
gucagagccucuggcccugc

SEQ ID NO: 2324 - RNA, 20 nt, Artificial Sequence
  synthesized
gucagagccucugucccugc

SEQ ID NO: 2325 - RNA, 20 nt, Artificial Sequence
  synthesized
gucccugccccucagcauuu

SEQ ID NO: 2326 - RNA, 20 nt, Artificial Sequence
  synthesized
ucagagccucuggcccugcc

SEQ ID NO: 2327 - RNA, 20 nt, Artificial Sequence
  synthesized
ucagagccucugucccugcc

SEQ ID NO: 2328 - RNA, 20 nt, Artificial Sequence
  synthesized
ucccugccccucagcauuuc

SEQ ID NO: 2329 - RNA, 20 nt, Artificial Sequence
  synthesized
ucuggcccugccccucagca

SEQ ID NO: 2330 - RNA, 20 nt, Artificial Sequence
  synthesized
ucugucccugccccucagca

SEQ ID NO: 2331 - RNA, 20 nt, Artificial Sequence
  synthesized
uggucagagccucuggcccu

SEQ ID NO: 2332 - RNA, 20 nt, Artificial Sequence
  synthesized
uggucagagccucugucccu

SEQ ID NO: 2333 - RNA, 20 nt, Artificial Sequence
  synthesized
acacaguccucccaccucag

SEQ ID NO: 2334 - RNA, 20 nt, Artificial Sequence
  synthesized
caaccuccugggcucacaca

SEQ ID NO: 2335 - RNA, 20 nt, Artificial Sequence
  synthesized
gaggcugaggugggaggacu

SEQ ID NO: 2336 - RNA, 20 nt, Artificial Sequence
  synthesized
ggacugugugagcccaggag

SEQ ID NO: 2337 - RNA, 20 nt, Artificial Sequence
  synthesized
guccucccaccucagccucc

SEQ ID NO: 2338 - RNA, 20 nt, Artificial Sequence
  synthesized
uccugggcucacacaguccu

SEQ ID NO: 2339 - RNA, 20 nt, Artificial Sequence
  synthesized
ugaggugggaggacugugug

SEQ ID NO: 2340 - RNA, 20 nt, Artificial Sequence
  synthesized
acccaucuguccauggaccc

SEQ ID NO: 2341 - RNA, 20 nt, Artificial Sequence
  synthesized
acccaucuguccguggaccc

SEQ ID NO: 2342 - RNA, 20 nt, Artificial Sequence
  synthesized
acggacagauggguaauaua

SEQ ID NO: 2343 - RNA, 20 nt, Artificial Sequence
  synthesized
aggguccacggacagauggg

SEQ ID NO: 2344 - RNA, 20 nt, Artificial Sequence
  synthesized
aggguccauggacagauggg

SEQ ID NO: 2345 - RNA, 20 nt, Artificial Sequence
  synthesized
auauuacccaucuguccaug

SEQ ID NO: 2346 - RNA, 20 nt, Artificial Sequence
  synthesized
auauuacccaucuguccgug

SEQ ID NO: 2347 - RNA, 20 nt, Artificial Sequence
  synthesized
auggacagauggguaauaua

SEQ ID NO: 2348 - RNA, 20 nt, Artificial Sequence
  synthesized
auuacccaucuguccaugga

SEQ ID NO: 2349 - RNA, 20 nt, Artificial Sequence
  synthesized
auuacccaucuguccgugga

SEQ ID NO: 2350 - RNA, 20 nt, Artificial Sequence
  synthesized
ccacggacagauggguaaua

SEQ ID NO: 2351 - RNA, 20 nt, Artificial Sequence
  synthesized
ccaucuguccauggacccua

SEQ ID NO: 2352 - RNA, 20 nt, Artificial Sequence
  synthesized
ccaucuguccguggacccua

SEQ ID NO: 2353 - RNA, 20 nt, Artificial Sequence
  synthesized
ccauggacagauggguaaua

SEQ ID NO: 2354 - RNA, 20 nt, Artificial Sequence
  synthesized
ccauggacccuagaggaaaa

SEQ ID NO: 2355 - RNA, 20 nt, Artificial Sequence
  synthesized
ccguggacccuagaggaaaa

SEQ ID NO: 2356 - RNA, 20 nt, Artificial Sequence
  synthesized
cggacagauggguaauauag

SEQ ID NO: 2357 - RNA, 20 nt, Artificial Sequence
  synthesized
cuguccauggacccuagagg

SEQ ID NO: 2358 - RNA, 20 nt, Artificial Sequence
  synthesized
cuguccguggacccuagagg

SEQ ID NO: 2359 - RNA, 20 nt, Artificial Sequence
  synthesized
ggguccacggacagaugggu

SEQ ID NO: 2360 - RNA, 20 nt, Artificial Sequence
  synthesized
ggguccauggacagaugggu

SEQ ID NO: 2361 - RNA, 20 nt, Artificial Sequence
  synthesized
gguccacggacagaugggua

SEQ ID NO: 2362 - RNA, 20 nt, Artificial Sequence
  synthesized
gguccauggacagaugggua

SEQ ID NO: 2363 - RNA, 20 nt, Artificial Sequence
  synthesized
guccacggacagauggguaa

SEQ ID NO: 2364 - RNA, 20 nt, Artificial Sequence
  synthesized
guccauggacagauggguaa

SEQ ID NO: 2365 - RNA, 20 nt, Artificial Sequence
  synthesized
guccauggacccuagaggaa

SEQ ID NO: 2366 - RNA, 20 nt, Artificial Sequence
  synthesized
guccguggacccuagaggaa

SEQ ID NO: 2367 - RNA, 20 nt, Artificial Sequence
  synthesized
uacccaucuguccauggacc

SEQ ID NO: 2368 - RNA, 20 nt, Artificial Sequence
  synthesized
uacccaucuguccguggacc

SEQ ID NO: 2369 - RNA, 20 nt, Artificial Sequence
  synthesized
uaggguccacggacagaugg

SEQ ID NO: 2370 - RNA, 20 nt, Artificial Sequence
  synthesized
uauuacccaucuguccaugg

SEQ ID NO: 2371 - RNA, 20 nt, Artificial Sequence
  synthesized
uauuacccaucuguccgugg

SEQ ID NO: 2372 - RNA, 20 nt, Artificial Sequence
  synthesized
uccacggacagauggguaau

SEQ ID NO: 2373 - RNA, 20 nt, Artificial Sequence
  synthesized
uccauggacagauggguaau

SEQ ID NO: 2374 - RNA, 20 nt, Artificial Sequence
  synthesized
uccauggacccuagaggaaa

SEQ ID NO: 2375 - RNA, 20 nt, Artificial Sequence
  synthesized
uccguggacccuagaggaaa

SEQ ID NO: 2376 - RNA, 20 nt, Artificial Sequence
  synthesized
uccucuaggguccacggaca

SEQ ID NO: 2377 - RNA, 20 nt, Artificial Sequence
  synthesized
uccucuaggguccauggaca

SEQ ID NO: 2378 - RNA, 20 nt, Artificial Sequence
  synthesized
ucuguccauggacccuagag

SEQ ID NO: 2379 - RNA, 20 nt, Artificial Sequence
  synthesized
ucuguccguggacccuagag

SEQ ID NO: 2380 - RNA, 20 nt, Artificial Sequence
  synthesized
uggacagauggguaauauag

SEQ ID NO: 2381 - RNA, 20 nt, Artificial Sequence
  synthesized
uguccauggacccuagagga

SEQ ID NO: 2382 - RNA, 20 nt, Artificial Sequence
  synthesized
uguccguggacccuagagga

SEQ ID NO: 2383 - RNA, 20 nt, Artificial Sequence
  synthesized
uuacccaucuguccguggac

SEQ ID NO: 2384 - RNA, 20 nt, Artificial Sequence
  synthesized
uuuccucuaggguccacgga

SEQ ID NO: 2385 - RNA, 20 nt, Artificial Sequence
  synthesized
uuuccucuaggguccaugga

SEQ ID NO: 2386 - RNA, 20 nt, Artificial Sequence
  synthesized
aacaauaggugaaucugugu

SEQ ID NO: 2387 - RNA, 20 nt, Artificial Sequence
  synthesized
aaucuggguaaacagccugu

SEQ ID NO: 2388 - RNA, 20 nt, Artificial Sequence
  synthesized
aaucuguguaaacagccugu

SEQ ID NO: 2389 - RNA, 20 nt, Artificial Sequence
  synthesized
acacucacaggcuguuuaca

SEQ ID NO: 2390 - RNA, 20 nt, Artificial Sequence
  synthesized
acacucacaggcuguuuacc

SEQ ID NO: 2391 - RNA, 20 nt, Artificial Sequence
  synthesized
acaggcuguuuacacagauu

SEQ ID NO: 2392 - RNA, 20 nt, Artificial Sequence
  synthesized
acaggcuguuuacccagauu

SEQ ID NO: 2393 - RNA, 20 nt, Artificial Sequence
  synthesized
acucacaggcuguuuacaca

SEQ ID NO: 2394 - RNA, 20 nt, Artificial Sequence
  synthesized
acucacaggcuguuuaccca

SEQ ID NO: 2395 - RNA, 20 nt, Artificial Sequence
  synthesized
aggcuguuuacacagauuca

SEQ ID NO: 2396 - RNA, 20 nt, Artificial Sequence
  synthesized
aggcuguuuacccagauuca

SEQ ID NO: 2397 - RNA, 20 nt, Artificial Sequence
  synthesized
aggugaaucuggguaaacag

SEQ ID NO: 2398 - RNA, 20 nt, Artificial Sequence
  synthesized
aggugaaucuguguaaacag

SEQ ID NO: 2399 - RNA, 20 nt, Artificial Sequence
  synthesized
auaggugaaucuggguaaac

SEQ ID NO: 2400 - RNA, 20 nt, Artificial Sequence
  synthesized
auaggugaaucuguguaaac

SEQ ID NO: 2401 - RNA, 20 nt, Artificial Sequence
  synthesized
caauaggugaaucuguguaa

SEQ ID NO: 2402 - RNA, 20 nt, Artificial Sequence
  synthesized
cacaggcuguuuacacagau

SEQ ID NO: 2403 - RNA, 20 nt, Artificial Sequence
  synthesized
cacaggcuguuuacccagau

SEQ ID NO: 2404 - RNA, 20 nt, Artificial Sequence
  synthesized
caggcuguuuacacagauuc

SEQ ID NO: 2405 - RNA, 20 nt, Artificial Sequence
  synthesized
caggcuguuuacccagauuc

SEQ ID NO: 2406 - RNA, 20 nt, Artificial Sequence
  synthesized
cuggguaaacagccugugag

SEQ ID NO: 2407 - RNA, 20 nt, Artificial Sequence
  synthesized
cuguguaaacagccugugag

SEQ ID NO: 2408 - RNA, 20 nt, Artificial Sequence
  synthesized
cuguuuacacagauucaccu

SEQ ID NO: 2409 - RNA, 20 nt, Artificial Sequence
  synthesized
gcuaacaauaggugaaucug

SEQ ID NO: 2410 - RNA, 20 nt, Artificial Sequence
  synthesized
gcuguuuacacagauucacc

SEQ ID NO: 2411 - RNA, 20 nt, Artificial Sequence
  synthesized
ggcuguuuacacagauucac

SEQ ID NO: 2412 - RNA, 20 nt, Artificial Sequence
  synthesized
ggcuguuuacccagauucac

SEQ ID NO: 2413 - RNA, 20 nt, Artificial Sequence
  synthesized
ggguaaacagccugugagug

SEQ ID NO: 2414 - RNA, 20 nt, Artificial Sequence
  synthesized
gguaaacagccugugagugu

SEQ ID NO: 2415 - RNA, 20 nt, Artificial Sequence
  synthesized
ggugaaucuggguaaacagc

SEQ ID NO: 2416 - RNA, 20 nt, Artificial Sequence
  synthesized
ggugaaucuguguaaacagc

SEQ ID NO: 2417 - RNA, 20 nt, Artificial Sequence
  synthesized
guguaaacagccugugagug

SEQ ID NO: 2418 - RNA, 20 nt, Artificial Sequence
  synthesized
guuuacacagauucaccuau

SEQ ID NO: 2419 - RNA, 20 nt, Artificial Sequence
  synthesized
uacacagauucaccuauugu

SEQ ID NO: 2420 - RNA, 20 nt, Artificial Sequence
  synthesized
uaggugaaucuggguaaaca

SEQ ID NO: 2421 - RNA, 20 nt, Artificial Sequence
  synthesized
uaggugaaucuguguaaaca

SEQ ID NO: 2422 - RNA, 20 nt, Artificial Sequence
  synthesized
ucacaggcuguuuacacaga

SEQ ID NO: 2423 - RNA, 20 nt, Artificial Sequence
  synthesized
ucacaggcuguuuacccaga

SEQ ID NO: 2424 - RNA, 20 nt, Artificial Sequence
  synthesized
ucuggguaaacagccuguga

SEQ ID NO: 2425 - RNA, 20 nt, Artificial Sequence
  synthesized
ucuguguaaacagccuguga

SEQ ID NO: 2426 - RNA, 20 nt, Artificial Sequence
  synthesized
ugaaucuggguaaacagccu

SEQ ID NO: 2427 - RNA, 20 nt, Artificial Sequence
  synthesized
ugaaucuguguaaacagccu

SEQ ID NO: 2428 - RNA, 20 nt, Artificial Sequence
  synthesized
uggguaaacagccugugagu

SEQ ID NO: 2429 - RNA, 20 nt, Artificial Sequence
  synthesized
uguaaacagccugugagugu

SEQ ID NO: 2430 - RNA, 20 nt, Artificial Sequence
  synthesized
uguguaaacagccugugagu

SEQ ID NO: 2431 - RNA, 20 nt, Artificial Sequence
  synthesized
uguuuacacagauucaccua

SEQ ID NO: 2432 - RNA, 20 nt, Artificial Sequence
  synthesized
aaggggucacagggccgguc

SEQ ID NO: 2433 - RNA, 20 nt, Artificial Sequence
  synthesized
accccucaccgggggccgug

SEQ ID NO: 2434 - RNA, 20 nt, Artificial Sequence
  synthesized
accccuuaccgggggccgug

SEQ ID NO: 2435 - RNA, 20 nt, Artificial Sequence
  synthesized
accggcccugugaccccuca

SEQ ID NO: 2436 - RNA, 20 nt, Artificial Sequence
  synthesized
accggcccugugaccccuua

SEQ ID NO: 2437 - RNA, 20 nt, Artificial Sequence
  synthesized
acggcccccgguaagggguc

SEQ ID NO: 2438 - RNA, 20 nt, Artificial Sequence
  synthesized
acggcccccggugagggguc

SEQ ID NO: 2439 - RNA, 20 nt, Artificial Sequence
  synthesized
caccgggggccgugggcccg

SEQ ID NO: 2440 - RNA, 20 nt, Artificial Sequence
  synthesized
cacggcccccgguaaggggu

SEQ ID NO: 2441 - RNA, 20 nt, Artificial Sequence
  synthesized
cacggcccccggugaggggu

SEQ ID NO: 2442 - RNA, 20 nt, Artificial Sequence
  synthesized
ccacggcccccgguaagggg

SEQ ID NO: 2443 - RNA, 20 nt, Artificial Sequence
  synthesized
ccacggcccccggugagggg

SEQ ID NO: 2444 - RNA, 20 nt, Artificial Sequence
  synthesized
cccacggcccccgguaaggg

SEQ ID NO: 2445 - RNA, 20 nt, Artificial Sequence
  synthesized
cccacggcccccggugaggg

SEQ ID NO: 2446 - RNA, 20 nt, Artificial Sequence
  synthesized
cccccgguaaggggucacag

SEQ ID NO: 2447 - RNA, 20 nt, Artificial Sequence
  synthesized
cccccggugaggggucacag

SEQ ID NO: 2448 - RNA, 20 nt, Artificial Sequence
  synthesized
ccccucaccgggggccgugg

SEQ ID NO: 2449 - RNA, 20 nt, Artificial Sequence
  synthesized
ccccuuaccgggggccgugg

SEQ ID NO: 2450 - RNA, 20 nt, Artificial Sequence
  synthesized
cccgguaaggggucacaggg

SEQ ID NO: 2451 - RNA, 20 nt, Artificial Sequence
  synthesized
cccggugaggggucacaggg

SEQ ID NO: 2452 - RNA, 20 nt, Artificial Sequence
  synthesized
cccucaccgggggccguggg

SEQ ID NO: 2453 - RNA, 20 nt, Artificial Sequence
  synthesized
cccugugaccccucaccggg

SEQ ID NO: 2454 - RNA, 20 nt, Artificial Sequence
  synthesized
cccugugaccccuuaccggg

SEQ ID NO: 2455 - RNA, 20 nt, Artificial Sequence
  synthesized
cccuuaccgggggccguggg

SEQ ID NO: 2456 - RNA, 20 nt, Artificial Sequence
  synthesized
ccugugaccccucaccgggg

SEQ ID NO: 2457 - RNA, 20 nt, Artificial Sequence
  synthesized
ccugugaccccuuaccgggg

SEQ ID NO: 2458 - RNA, 20 nt, Artificial Sequence
  synthesized
cgguaaggggucacagggcc

SEQ ID NO: 2459 - RNA, 20 nt, Artificial Sequence
  synthesized
cggugaggggucacagggcc

SEQ ID NO: 2460 - RNA, 20 nt, Artificial Sequence
  synthesized
cugugaccccucaccggggg

SEQ ID NO: 2461 - RNA, 20 nt, Artificial Sequence
  synthesized
cugugaccccuuaccggggg

SEQ ID NO: 2462 - RNA, 20 nt, Artificial Sequence
  synthesized
gaccggcccugugaccccuc

SEQ ID NO: 2463 - RNA, 20 nt, Artificial Sequence
  synthesized
gaccggcccugugaccccuu

SEQ ID NO: 2464 - RNA, 20 nt, Artificial Sequence
  synthesized
gaggggucacagggccgguc

SEQ ID NO: 2465 - RNA, 20 nt, Artificial Sequence
  synthesized
gguaaggggucacagggccg

SEQ ID NO: 2466 - RNA, 20 nt, Artificial Sequence
  synthesized
ggugaggggucacagggccg

SEQ ID NO: 2467 - RNA, 20 nt, Artificial Sequence
  synthesized
guaaggggucacagggccgg

SEQ ID NO: 2468 - RNA, 20 nt, Artificial Sequence
  synthesized
gugaggggucacagggccgg

SEQ ID NO: 2469 - RNA, 20 nt, Artificial Sequence
  synthesized
uaaggggucacagggccggu

SEQ ID NO: 2470 - RNA, 20 nt, Artificial Sequence
  synthesized
uaccgggggccgugggcccg

SEQ ID NO: 2471 - RNA, 20 nt, Artificial Sequence
  synthesized
ucaccgggggccgugggccc

SEQ ID NO: 2472 - RNA, 20 nt, Artificial Sequence
  synthesized
ugaggggucacagggccggu

SEQ ID NO: 2473 - RNA, 20 nt, Artificial Sequence
  synthesized
uuaccgggggccgugggccc

SEQ ID NO: 2474 - RNA, 20 nt, Artificial Sequence
  synthesized
aaggugcuaccggagccuuc

SEQ ID NO: 2475 - RNA, 20 nt, Artificial Sequence
  synthesized
acccuccgcucuggaaggcu

SEQ ID NO: 2476 - RNA, 20 nt, Artificial Sequence
  synthesized
ccgcucuggaaggcuccggu

SEQ ID NO: 2477 - RNA, 20 nt, Artificial Sequence
  synthesized
ccuuccagagcggaggguaa

SEQ ID NO: 2478 - RNA, 20 nt, Artificial Sequence
  synthesized
cgcucuggaaggcuccggua

SEQ ID NO: 2479 - RNA, 20 nt, Artificial Sequence
  synthesized
cggagccuuccagagcggag

SEQ ID NO: 2480 - RNA, 20 nt, Artificial Sequence
  synthesized
cuccgcucuggaaggcuccg

SEQ ID NO: 2481 - RNA, 20 nt, Artificial Sequence
  synthesized
cucuggaaggcuccgguagc

SEQ ID NO: 2482 - RNA, 20 nt, Artificial Sequence
  synthesized
cucugggaggcuccgguagc

SEQ ID NO: 2483 - RNA, 20 nt, Artificial Sequence
  synthesized
cuggaaggcuccgguagcac

SEQ ID NO: 2484 - RNA, 20 nt, Artificial Sequence
  synthesized
cugggaggcuccgguagcac

SEQ ID NO: 2485 - RNA, 20 nt, Artificial Sequence
  synthesized
cuuacccuccgcucuggaag

SEQ ID NO: 2486 - RNA, 20 nt, Artificial Sequence
  synthesized
cuuccagagcggaggguaag

SEQ ID NO: 2487 - RNA, 20 nt, Artificial Sequence
  synthesized
gaaggcuccgguagcaccuu

SEQ ID NO: 2488 - RNA, 20 nt, Artificial Sequence
  synthesized
gaaggugcuaccggagccuc

SEQ ID NO: 2489 - RNA, 20 nt, Artificial Sequence
  synthesized
gaaggugcuaccggagccuu

SEQ ID NO: 2490 - RNA, 20 nt, Artificial Sequence
  synthesized
gagccuuccagagcggaggg

SEQ ID NO: 2491 - RNA, 20 nt, Artificial Sequence
  synthesized
gcucuggaaggcuccgguag

SEQ ID NO: 2492 - RNA, 20 nt, Artificial Sequence
  synthesized
gcucugggaggcuccgguag

SEQ ID NO: 2493 - RNA, 20 nt, Artificial Sequence
  synthesized
ggaaggcuccgguagcaccu

SEQ ID NO: 2494 - RNA, 20 nt, Artificial Sequence
  synthesized
ggagccuuccagagcggagg

SEQ ID NO: 2495 - RNA, 20 nt, Artificial Sequence
  synthesized
ggaggcuccgguagcaccuu

SEQ ID NO: 2496 - RNA, 20 nt, Artificial Sequence
  synthesized
gggaggcuccgguagcaccu

SEQ ID NO: 2497 - RNA, 20 nt, Artificial Sequence
  synthesized
ggugcuaccggagccuccca

SEQ ID NO: 2498 - RNA, 20 nt, Artificial Sequence
  synthesized
ggugcuaccggagccuucca

SEQ ID NO: 2499 - RNA, 20 nt, Artificial Sequence
  synthesized
uccagagcggaggguaagag

SEQ ID NO: 2500 - RNA, 20 nt, Artificial Sequence
  synthesized
ucuggaaggcuccgguagca

SEQ ID NO: 2501 - RNA, 20 nt, Artificial Sequence
  synthesized
ucugggaggcuccgguagca

SEQ ID NO: 2502 - RNA, 20 nt, Artificial Sequence
  synthesized
ucuuacccuccgcucuggaa

SEQ ID NO: 2503 - RNA, 20 nt, Artificial Sequence
  synthesized
ugcuaccggagccuuccaga

SEQ ID NO: 2504 - RNA, 20 nt, Artificial Sequence
  synthesized
uggaaggcuccgguagcacc

SEQ ID NO: 2505 - RNA, 20 nt, Artificial Sequence
  synthesized
ugggaggcuccgguagcacc

SEQ ID NO: 2506 - RNA, 20 nt, Artificial Sequence
  synthesized
uuacccuccgcucuggaagg

SEQ ID NO: 2507 - RNA, 20 nt, Artificial Sequence
  synthesized
uuccagagcggaggguaaga

SEQ ID NO: 2508 - RNA, 20 nt, Artificial Sequence
  synthesized
aaagaagaagagagagagag

SEQ ID NO: 2509 - RNA, 20 nt, Artificial Sequence
  synthesized
agaagagagagagagagaga

SEQ ID NO: 2510 - RNA, 20 nt, Artificial Sequence
  synthesized
cucucucucucucucucucu

SEQ ID NO: 2511 - RNA, 20 nt, Artificial Sequence
  synthesized
cucucucucucucucuucuu

SEQ ID NO: 2512 - RNA, 20 nt, Artificial Sequence
  synthesized
guaugaaagaagaagagaga

SEQ ID NO: 2513 - RNA, 20 nt, Artificial Sequence
  synthesized
ucucucucucucucucucuc

SEQ ID NO: 2514 - RNA, 20 nt, Artificial Sequence
  synthesized
ucucucucucuucuucuuuc

SEQ ID NO: 2515 - RNA, 20 nt, Artificial Sequence
  synthesized
acucuaccuggcugggcugc

SEQ ID NO: 2516 - RNA, 20 nt, Artificial Sequence
  synthesized
agcugcagcccagccaggua

SEQ ID NO: 2517 - RNA, 20 nt, Artificial Sequence
  synthesized
cacucuaccuggcugggcug

SEQ ID NO: 2518 - RNA, 20 nt, Artificial Sequence
  synthesized
cagcccagccagguagagug

SEQ ID NO: 2519 - RNA, 20 nt, Artificial Sequence
  synthesized
ccacucuaccuggcugggcu

SEQ ID NO: 2520 - RNA, 20 nt, Artificial Sequence
  synthesized
ccuggcugggcugcagcugc

SEQ ID NO: 2521 - RNA, 20 nt, Artificial Sequence
  synthesized
cuaccuggcugggcugcagc

SEQ ID NO: 2522 - RNA, 20 nt, Artificial Sequence
  synthesized
cucuaccuggcugggcugca

SEQ ID NO: 2523 - RNA, 20 nt, Artificial Sequence
  synthesized
cugcagcccagccagguaga

SEQ ID NO: 2524 - RNA, 20 nt, Artificial Sequence
  synthesized
cugcagcugcccucccagcc

SEQ ID NO: 2525 - RNA, 20 nt, Artificial Sequence
  synthesized
cugggcugcagcugcccucc

SEQ ID NO: 2526 - RNA, 20 nt, Artificial Sequence
  synthesized
gagggcagcugcagcccagc

SEQ ID NO: 2527 - RNA, 20 nt, Artificial Sequence
  synthesized
gcagcccagccagguagagu

SEQ ID NO: 2528 - RNA, 20 nt, Artificial Sequence
  synthesized
gcugggagggcagcugcagc

SEQ ID NO: 2529 - RNA, 20 nt, Artificial Sequence
  synthesized
ggagcccagccagguagagu

SEQ ID NO: 2530 - RNA, 20 nt, Artificial Sequence
  synthesized
ggcagcugcagcccagccag

SEQ ID NO: 2531 - RNA, 20 nt, Artificial Sequence
  synthesized
ugggcugcagcugcccuccc

SEQ ID NO: 2532 - RNA, 20 nt, Artificial Sequence
  synthesized
aaaaauucuaaggagagagg

SEQ ID NO: 2533 - RNA, 20 nt, Artificial Sequence
  synthesized
aaauccucucuccuuagaau

SEQ ID NO: 2534 - RNA, 20 nt, Artificial Sequence
  synthesized
aaauucuaaggagagaggau

SEQ ID NO: 2535 - RNA, 20 nt, Artificial Sequence
  synthesized
aauccucucugcuuagaauu

SEQ ID NO: 2536 - RNA, 20 nt, Artificial Sequence
  synthesized
aauucuaagcagagaggauu

SEQ ID NO: 2537 - RNA, 20 nt, Artificial Sequence
  synthesized
aauucuaaggagagaggauu

SEQ ID NO: 2538 - RNA, 20 nt, Artificial Sequence
  synthesized
agaaaauccucucuccuuag

SEQ ID NO: 2539 - RNA, 20 nt, Artificial Sequence
  synthesized
agaaaauccucucugcuuag

SEQ ID NO: 2540 - RNA, 20 nt, Artificial Sequence
  synthesized
auccucucugcuuagaauuu

SEQ ID NO: 2541 - RNA, 20 nt, Artificial Sequence
  synthesized
auucuaagcagagaggauuu

SEQ ID NO: 2542 - RNA, 20 nt, Artificial Sequence
  synthesized
auucuaaggagagaggauuu

SEQ ID NO: 2543 - RNA, 20 nt, Artificial Sequence
  synthesized
cagaaaauccucucuccuua

SEQ ID NO: 2544 - RNA, 20 nt, Artificial Sequence
  synthesized
cagaaaauccucucugcuua

SEQ ID NO: 2545 - RNA, 20 nt, Artificial Sequence
  synthesized
gaaaauccucucuccuuaga

SEQ ID NO: 2546 - RNA, 20 nt, Artificial Sequence
  synthesized
ggacagaaaauccucucucc

SEQ ID NO: 2547 - RNA, 20 nt, Artificial Sequence
  synthesized
uggacagaaaauccucucuc

SEQ ID NO: 2548 - RNA, 20 nt, Artificial Sequence
  synthesized
uggacagaaaauccucucug

SEQ ID NO: 2549 - RNA, 20 nt, Artificial Sequence
  synthesized
aagcuguggaggugggggac

SEQ ID NO: 2550 - RNA, 20 nt, Artificial Sequence
  synthesized
aagcuguggcggugggggac

SEQ ID NO: 2551 - RNA, 20 nt, Artificial Sequence
  synthesized
accgccacagcuuaccgcau

SEQ ID NO: 2552 - RNA, 20 nt, Artificial Sequence
  synthesized
accuccacagcuuaccgcau

SEQ ID NO: 2553 - RNA, 20 nt, Artificial Sequence
  synthesized
acggcgucccccaccgccac

SEQ ID NO: 2554 - RNA, 20 nt, Artificial Sequence
  synthesized
acggcgucccccaccuccac

SEQ ID NO: 2555 - RNA, 20 nt, Artificial Sequence
  synthesized
agcuguggaggugggggacg

SEQ ID NO: 2556 - RNA, 20 nt, Artificial Sequence
  synthesized
agcuguggcggugggggacg

SEQ ID NO: 2557 - RNA, 20 nt, Artificial Sequence
  synthesized
aggugggggacgccgugagc

SEQ ID NO: 2558 - RNA, 20 nt, Artificial Sequence
  synthesized
caccgccacagcuuaccgca

SEQ ID NO: 2559 - RNA, 20 nt, Artificial Sequence
  synthesized
caccuccacagcuuaccgca

SEQ ID NO: 2560 - RNA, 20 nt, Artificial Sequence
  synthesized
cacggcgucccccaccgcca

SEQ ID NO: 2561 - RNA, 20 nt, Artificial Sequence
  synthesized
cacggcgucccccaccucca

SEQ ID NO: 2562 - RNA, 20 nt, Artificial Sequence
  synthesized
ccaccgccacagcuuaccgc

SEQ ID NO: 2563 - RNA, 20 nt, Artificial Sequence
  synthesized
ccaccuccacagcuuaccgc

SEQ ID NO: 2564 - RNA, 20 nt, Artificial Sequence
  synthesized
cccaccgccacagcuuaccg

SEQ ID NO: 2565 - RNA, 20 nt, Artificial Sequence
  synthesized
cccaccuccacagcuuaccg

SEQ ID NO: 2566 - RNA, 20 nt, Artificial Sequence
  synthesized
ccccaccgccacagcuuacc

SEQ ID NO: 2567 - RNA, 20 nt, Artificial Sequence
  synthesized
ccccaccuccacagcuuacc

SEQ ID NO: 2568 - RNA, 20 nt, Artificial Sequence
  synthesized
cccccaccgccacagcuuac

SEQ ID NO: 2569 - RNA, 20 nt, Artificial Sequence
  synthesized
cccccaccuccacagcuuac

SEQ ID NO: 2570 - RNA, 20 nt, Artificial Sequence
  synthesized
ccgccacagcuuaccgcauc

SEQ ID NO: 2571 - RNA, 20 nt, Artificial Sequence
  synthesized
ccuccacagcuuaccgcauc

SEQ ID NO: 2572 - RNA, 20 nt, Artificial Sequence
  synthesized
cgccacagcuuaccgcaucc

SEQ ID NO: 2573 - RNA, 20 nt, Artificial Sequence
  synthesized
cggcgucccccaccgccaca

SEQ ID NO: 2574 - RNA, 20 nt, Artificial Sequence
  synthesized
cggcgucccccaccuccaca

SEQ ID NO: 2575 - RNA, 20 nt, Artificial Sequence
  synthesized
cggugggggacgccgugagc

SEQ ID NO: 2576 - RNA, 20 nt, Artificial Sequence
  synthesized
cucacggcgucccccaccgc

SEQ ID NO: 2577 - RNA, 20 nt, Artificial Sequence
  synthesized
cucacggcgucccccaccuc

SEQ ID NO: 2578 - RNA, 20 nt, Artificial Sequence
  synthesized
cuccacagcuuaccgcaucc

SEQ ID NO: 2579 - RNA, 20 nt, Artificial Sequence
  synthesized
cuguggaggugggggacgcc

SEQ ID NO: 2580 - RNA, 20 nt, Artificial Sequence
  synthesized
cuguggcggugggggacgcc

SEQ ID NO: 2581 - RNA, 20 nt, Artificial Sequence
  synthesized
gaggugggggacgccgugag

SEQ ID NO: 2582 - RNA, 20 nt, Artificial Sequence
  synthesized
gcggugggggacgccgugag

SEQ ID NO: 2583 - RNA, 20 nt, Artificial Sequence
  synthesized
gcgucccccaccgccacagc

SEQ ID NO: 2584 - RNA, 20 nt, Artificial Sequence
  synthesized
gcgucccccaccuccacagc

SEQ ID NO: 2585 - RNA, 20 nt, Artificial Sequence
  synthesized
gcucacggcgucccccaccg

SEQ ID NO: 2586 - RNA, 20 nt, Artificial Sequence
  synthesized
gcucacggcgucccccaccu

SEQ ID NO: 2587 - RNA, 20 nt, Artificial Sequence
  synthesized
ggaggugggggacgccguga

SEQ ID NO: 2588 - RNA, 20 nt, Artificial Sequence
  synthesized
ggaugcgguaagcuguggag

SEQ ID NO: 2589 - RNA, 20 nt, Artificial Sequence
  synthesized
ggaugcgguaagcuguggcg

SEQ ID NO: 2590 - RNA, 20 nt, Artificial Sequence
  synthesized
ggcggugggggacgccguga

SEQ ID NO: 2591 - RNA, 20 nt, Artificial Sequence
  synthesized
ggcgucccccaccgccacag

SEQ ID NO: 2592 - RNA, 20 nt, Artificial Sequence
  synthesized
ggcgucccccaccuccacag

SEQ ID NO: 2593 - RNA, 20 nt, Artificial Sequence
  synthesized
gguaagcuguggaggugggg

SEQ ID NO: 2594 - RNA, 20 nt, Artificial Sequence
  synthesized
gguaagcuguggcggugggg

SEQ ID NO: 2595 - RNA, 20 nt, Artificial Sequence
  synthesized
guaagcuguggagguggggg

SEQ ID NO: 2596 - RNA, 20 nt, Artificial Sequence
  synthesized
guaagcuguggcgguggggg

SEQ ID NO: 2597 - RNA, 20 nt, Artificial Sequence
  synthesized
gucccccaccgccacagcuu

SEQ ID NO: 2598 - RNA, 20 nt, Artificial Sequence
  synthesized
gucccccaccuccacagcuu

SEQ ID NO: 2599 - RNA, 20 nt, Artificial Sequence
  synthesized
guggaggugggggacgccgu

SEQ ID NO: 2600 - RNA, 20 nt, Artificial Sequence
  synthesized
guggcggugggggacgccgu

SEQ ID NO: 2601 - RNA, 20 nt, Artificial Sequence
  synthesized
uaagcuguggagguggggga

SEQ ID NO: 2602 - RNA, 20 nt, Artificial Sequence
  synthesized
uaagcuguggcgguggggga

SEQ ID NO: 2603 - RNA, 20 nt, Artificial Sequence
  synthesized
ucacggcgucccccaccgcc

SEQ ID NO: 2604 - RNA, 20 nt, Artificial Sequence
  synthesized
ucacggcgucccccaccucc

SEQ ID NO: 2605 - RNA, 20 nt, Artificial Sequence
  synthesized
uggaggugggggacgccgug

SEQ ID NO: 2606 - RNA, 20 nt, Artificial Sequence
  synthesized
uggcggugggggacgccgug

SEQ ID NO: 2607 - RNA, 20 nt, Artificial Sequence
  synthesized
aagucccgcccccagcagcc

SEQ ID NO: 2608 - RNA, 20 nt, Artificial Sequence
  synthesized
acggggcugcugggggcggg

SEQ ID NO: 2609 - RNA, 20 nt, Artificial Sequence
  synthesized
agcucagguacaagucccgc

SEQ ID NO: 2610 - RNA, 20 nt, Artificial Sequence
  synthesized
agcucagguacaaguccugc

SEQ ID NO: 2611 - RNA, 20 nt, Artificial Sequence
  synthesized
aggacuuguaccugagcugc

SEQ ID NO: 2612 - RNA, 20 nt, Artificial Sequence
  synthesized
agguacaaguccugccccca

SEQ ID NO: 2613 - RNA, 20 nt, Artificial Sequence
  synthesized
agucccgcccccagcagccc

SEQ ID NO: 2614 - RNA, 20 nt, Artificial Sequence
  synthesized
aguccugcccccagcagccc

SEQ ID NO: 2615 - RNA, 20 nt, Artificial Sequence
  synthesized
caagucccgcccccagcagc

SEQ ID NO: 2616 - RNA, 20 nt, Artificial Sequence
  synthesized
caaguccugcccccagcagc

SEQ ID NO: 2617 - RNA, 20 nt, Artificial Sequence
  synthesized
cagcucagguacaagucccg

SEQ ID NO: 2618 - RNA, 20 nt, Artificial Sequence
  synthesized
cagcucagguacaaguccug

SEQ ID NO: 2619 - RNA, 20 nt, Artificial Sequence
  synthesized
caggcagcucagguacaagu

SEQ ID NO: 2620 - RNA, 20 nt, Artificial Sequence
  synthesized
cccgcccccagcagccccgu

SEQ ID NO: 2621 - RNA, 20 nt, Artificial Sequence
  synthesized
ccgcccccagcagccccguc

SEQ ID NO: 2622 - RNA, 20 nt, Artificial Sequence
  synthesized
ccugcccccagcagccccgu

SEQ ID NO: 2623 - RNA, 20 nt, Artificial Sequence
  synthesized
cgcccccagcagccccgucu

SEQ ID NO: 2624 - RNA, 20 nt, Artificial Sequence
  synthesized
cgggacuuguaccugagcug

SEQ ID NO: 2625 - RNA, 20 nt, Artificial Sequence
  synthesized
cggggcugcugggggcagga

SEQ ID NO: 2626 - RNA, 20 nt, Artificial Sequence
  synthesized
cggggcugcugggggcggga

SEQ ID NO: 2627 - RNA, 20 nt, Artificial Sequence
  synthesized
cucagguacaagucccgccc

SEQ ID NO: 2628 - RNA, 20 nt, Artificial Sequence
  synthesized
cucagguacaaguccugccc

SEQ ID NO: 2629 - RNA, 20 nt, Artificial Sequence
  synthesized
cugcccccagcagccccguc

SEQ ID NO: 2630 - RNA, 20 nt, Artificial Sequence
  synthesized
cugcugggggcaggacuugu

SEQ ID NO: 2631 - RNA, 20 nt, Artificial Sequence
  synthesized
gacggggcugcugggggcag

SEQ ID NO: 2632 - RNA, 20 nt, Artificial Sequence
  synthesized
gacggggcugcugggggcgg

SEQ ID NO: 2633 - RNA, 20 nt, Artificial Sequence
  synthesized
gcagcucagguacaaguccc

SEQ ID NO: 2634 - RNA, 20 nt, Artificial Sequence
  synthesized
gcagcucagguacaaguccu

SEQ ID NO: 2635 - RNA, 20 nt, Artificial Sequence
  synthesized
gcaggacuuguaccugagcu

SEQ ID NO: 2636 - RNA, 20 nt, Artificial Sequence
  synthesized
gcgggacuuguaccugagcu

SEQ ID NO: 2637 - RNA, 20 nt, Artificial Sequence
  synthesized
gcugggggcaggacuuguac

SEQ ID NO: 2638 - RNA, 20 nt, Artificial Sequence
  synthesized
gcugggggcgggacuuguac

SEQ ID NO: 2639 - RNA, 20 nt, Artificial Sequence
  synthesized
ggcagcucagguacaagucc

SEQ ID NO: 2640 - RNA, 20 nt, Artificial Sequence
  synthesized
ggcgggacuuguaccugagc

SEQ ID NO: 2641 - RNA, 20 nt, Artificial Sequence
  synthesized
ggcugcugggggcaggacuu

SEQ ID NO: 2642 - RNA, 20 nt, Artificial Sequence
  synthesized
gggacuuguaccugagcugc

SEQ ID NO: 2643 - RNA, 20 nt, Artificial Sequence
  synthesized
gggcaggacuuguaccugag

SEQ ID NO: 2644 - RNA, 20 nt, Artificial Sequence
  synthesized
gggcgggacuuguaccugag

SEQ ID NO: 2645 - RNA, 20 nt, Artificial Sequence
  synthesized
gggcugcugggggcaggacu

SEQ ID NO: 2646 - RNA, 20 nt, Artificial Sequence
  synthesized
gggcugcugggggcgggacu

SEQ ID NO: 2647 - RNA, 20 nt, Artificial Sequence
  synthesized
ggggcaggacuuguaccuga

SEQ ID NO: 2648 - RNA, 20 nt, Artificial Sequence
  synthesized
ggggcgggacuuguaccuga

SEQ ID NO: 2649 - RNA, 20 nt, Artificial Sequence
  synthesized
ggggcugcugggggcaggac

SEQ ID NO: 2650 - RNA, 20 nt, Artificial Sequence
  synthesized
gggggcaggacuuguaccug

SEQ ID NO: 2651 - RNA, 20 nt, Artificial Sequence
  synthesized
gggggcgggacuuguaccug

SEQ ID NO: 2652 - RNA, 20 nt, Artificial Sequence
  synthesized
guacaaguccugcccccagc

SEQ ID NO: 2653 - RNA, 20 nt, Artificial Sequence
  synthesized
gucccgcccccagcagcccc

SEQ ID NO: 2654 - RNA, 20 nt, Artificial Sequence
  synthesized
uacaagucccgcccccagca

SEQ ID NO: 2655 - RNA, 20 nt, Artificial Sequence
  synthesized
uacaaguccugcccccagca

SEQ ID NO: 2656 - RNA, 20 nt, Artificial Sequence
  synthesized
ucagguacaagucccgcccc

SEQ ID NO: 2657 - RNA, 20 nt, Artificial Sequence
  synthesized
ucagguacaaguccugcccc

SEQ ID NO: 2658 - RNA, 20 nt, Artificial Sequence
  synthesized
ucccgcccccagcagccccg

SEQ ID NO: 2659 - RNA, 20 nt, Artificial Sequence
  synthesized
uccugcccccagcagccccg

SEQ ID NO: 2660 - RNA, 20 nt, Artificial Sequence
  synthesized
ugcccccagcagccccgucu

SEQ ID NO: 2661 - RNA, 20 nt, Artificial Sequence
  synthesized
ugcugggggcaggacuugua

SEQ ID NO: 2662 - RNA, 20 nt, Artificial Sequence
  synthesized
ugggggcaggacuuguaccu

SEQ ID NO: 2663 - RNA, 20 nt, Artificial Sequence
  synthesized
ugggggcgggacuuguaccu

SEQ ID NO: 2664 - RNA, 20 nt, Artificial Sequence
  synthesized
agaugucaacacugaggcuu

SEQ ID NO: 2665 - RNA, 20 nt, Artificial Sequence
  synthesized
aguguugacaucuguaaaac

SEQ ID NO: 2666 - RNA, 20 nt, Artificial Sequence
  synthesized
augucaacacugaggcuuag

SEQ ID NO: 2667 - RNA, 20 nt, Artificial Sequence
  synthesized
caguguugacaucuguaaaa

SEQ ID NO: 2668 - RNA, 20 nt, Artificial Sequence
  synthesized
ccucaguguuaacaucugua

SEQ ID NO: 2669 - RNA, 20 nt, Artificial Sequence
  synthesized
cucaguguuaacaucuguaa

SEQ ID NO: 2670 - RNA, 20 nt, Artificial Sequence
  synthesized
cucaguguugacaucuguaa

SEQ ID NO: 2671 - RNA, 20 nt, Artificial Sequence
  synthesized
cuuucuaagccucaguguug

SEQ ID NO: 2672 - RNA, 20 nt, Artificial Sequence
  synthesized
guguugacaucuguaaaaca

SEQ ID NO: 2673 - RNA, 20 nt, Artificial Sequence
  synthesized
uaagccucaguguugacauc

SEQ ID NO: 2674 - RNA, 20 nt, Artificial Sequence
  synthesized
uacagaugucaacacugagg

SEQ ID NO: 2675 - RNA, 20 nt, Artificial Sequence
  synthesized
uguugacaucuguaaaacag

SEQ ID NO: 2676 - RNA, 20 nt, Artificial Sequence
  synthesized
uucuaagccucaguguugac

SEQ ID NO: 2677 - RNA, 20 nt, Artificial Sequence
  synthesized
aaguccuggaaugugcagcu

SEQ ID NO: 2678 - RNA, 20 nt, Artificial Sequence
  synthesized
aaugugcagcuccccccagg

SEQ ID NO: 2679 - RNA, 20 nt, Artificial Sequence
  synthesized
aaugugcagcuccucccagg

SEQ ID NO: 2680 - RNA, 20 nt, Artificial Sequence
  synthesized
acagcuugggccugggagga

SEQ ID NO: 2681 - RNA, 20 nt, Artificial Sequence
  synthesized
acagcuugggccugggggga

SEQ ID NO: 2682 - RNA, 20 nt, Artificial Sequence
  synthesized
agcuccccccaggcccaagc

SEQ ID NO: 2683 - RNA, 20 nt, Artificial Sequence
  synthesized
agcuugggccugggaggagc

SEQ ID NO: 2684 - RNA, 20 nt, Artificial Sequence
  synthesized
agcuugggccuggggggagc

SEQ ID NO: 2685 - RNA, 20 nt, Artificial Sequence
  synthesized
aggagcugcacauuccagga

SEQ ID NO: 2686 - RNA, 20 nt, Artificial Sequence
  synthesized
augugcagcuccccccaggc

SEQ ID NO: 2687 - RNA, 20 nt, Artificial Sequence
  synthesized
augugcagcuccucccaggc

SEQ ID NO: 2688 - RNA, 20 nt, Artificial Sequence
  synthesized
cagcuccccccaggcccaag

SEQ ID NO: 2689 - RNA, 20 nt, Artificial Sequence
  synthesized
cagcuccucccaggcccaag

SEQ ID NO: 2690 - RNA, 20 nt, Artificial Sequence
  synthesized
cagcuugggccugggaggag

SEQ ID NO: 2691 - RNA, 20 nt, Artificial Sequence
  synthesized
ccccaggcccaagcuguccu

SEQ ID NO: 2692 - RNA, 20 nt, Artificial Sequence
  synthesized
cccccaggcccaagcugucc

SEQ ID NO: 2693 - RNA, 20 nt, Artificial Sequence
  synthesized
ccccccaggcccaagcuguc

SEQ ID NO: 2694 - RNA, 20 nt, Artificial Sequence
  synthesized
ccucccaggcccaagcuguc

SEQ ID NO: 2695 - RNA, 20 nt, Artificial Sequence
  synthesized
ccuggaaugugcagcucccc

SEQ ID NO: 2696 - RNA, 20 nt, Artificial Sequence
  synthesized
ccuggaaugugcagcuccuc

SEQ ID NO: 2697 - RNA, 20 nt, Artificial Sequence
  synthesized
ccuggggggagcugcacauu

SEQ ID NO: 2698 - RNA, 20 nt, Artificial Sequence
  synthesized
cucccaggcccaagcugucc

SEQ ID NO: 2699 - RNA, 20 nt, Artificial Sequence
  synthesized
cuggaaugugcagcuccccc

SEQ ID NO: 2700 - RNA, 20 nt, Artificial Sequence
  synthesized
cugggaggagcugcacauuc

SEQ ID NO: 2701 - RNA, 20 nt, Artificial Sequence
  synthesized
cuggggggagcugcacauuc

SEQ ID NO: 2702 - RNA, 20 nt, Artificial Sequence
  synthesized
cuugggccugggaggagcug

SEQ ID NO: 2703 - RNA, 20 nt, Artificial Sequence
  synthesized
cuugggccuggggggagcug

SEQ ID NO: 2704 - RNA, 20 nt, Artificial Sequence
  synthesized
gaaugugcagcuccccccag

SEQ ID NO: 2705 - RNA, 20 nt, Artificial Sequence
  synthesized
gacagcuugggccugggggg

SEQ ID NO: 2706 - RNA, 20 nt, Artificial Sequence
  synthesized
gcagcuccucccaggcccaa

SEQ ID NO: 2707 - RNA, 20 nt, Artificial Sequence
  synthesized
gccuggggggagcugcacau

SEQ ID NO: 2708 - RNA, 20 nt, Artificial Sequence
  synthesized
gcuugggccugggaggagcu

SEQ ID NO: 2709 - RNA, 20 nt, Artificial Sequence
  synthesized
gcuugggccuggggggagcu

SEQ ID NO: 2710 - RNA, 20 nt, Artificial Sequence
  synthesized
ggaaugugcagcucccccca

SEQ ID NO: 2711 - RNA, 20 nt, Artificial Sequence
  synthesized
ggaaugugcagcuccuccca

SEQ ID NO: 2712 - RNA, 20 nt, Artificial Sequence
  synthesized
ggaggagcugcacauuccag

SEQ ID NO: 2713 - RNA, 20 nt, Artificial Sequence
  synthesized
ggccugggaggagcugcaca

SEQ ID NO: 2714 - RNA, 20 nt, Artificial Sequence
  synthesized
ggccuggggggagcugcaca

SEQ ID NO: 2715 - RNA, 20 nt, Artificial Sequence
  synthesized
gggagcugcacauuccagga

SEQ ID NO: 2716 - RNA, 20 nt, Artificial Sequence
  synthesized
gggaggagcugcacauucca

SEQ ID NO: 2717 - RNA, 20 nt, Artificial Sequence
  synthesized
gggccuggggggagcugcac

SEQ ID NO: 2718 - RNA, 20 nt, Artificial Sequence
  synthesized
ggggagcugcacauuccagg

SEQ ID NO: 2719 - RNA, 20 nt, Artificial Sequence
  synthesized
gggggagcugcacauuccag

SEQ ID NO: 2720 - RNA, 20 nt, Artificial Sequence
  synthesized
ggggggagcugcacauucca

SEQ ID NO: 2721 - RNA, 20 nt, Artificial Sequence
  synthesized
gugcagcuccccccaggccc

SEQ ID NO: 2722 - RNA, 20 nt, Artificial Sequence
  synthesized
gugcagcuccucccaggccc

SEQ ID NO: 2723 - RNA, 20 nt, Artificial Sequence
  synthesized
ucccaggcccaagcuguccu

SEQ ID NO: 2724 - RNA, 20 nt, Artificial Sequence
  synthesized
uccuggaaugugcagcuccc

SEQ ID NO: 2725 - RNA, 20 nt, Artificial Sequence
  synthesized
uccuggaaugugcagcuccu

SEQ ID NO: 2726 - RNA, 20 nt, Artificial Sequence
  synthesized
ugcagcuccccccaggccca

SEQ ID NO: 2727 - RNA, 20 nt, Artificial Sequence
  synthesized
ugcagcuccucccaggccca

SEQ ID NO: 2728 - RNA, 20 nt, Artificial Sequence
  synthesized
uggaaugugcagcucccccc

SEQ ID NO: 2729 - RNA, 20 nt, Artificial Sequence
  synthesized
ugggaggagcugcacauucc

SEQ ID NO: 2730 - RNA, 20 nt, Artificial Sequence
  synthesized
ugggccugggaggagcugca

SEQ ID NO: 2731 - RNA, 20 nt, Artificial Sequence
  synthesized
ugggccuggggggagcugca

SEQ ID NO: 2732 - RNA, 20 nt, Artificial Sequence
  synthesized
uggggggagcugcacauucc

SEQ ID NO: 2733 - RNA, 20 nt, Artificial Sequence
  synthesized
ugugcagcuccccccaggcc

SEQ ID NO: 2734 - RNA, 20 nt, Artificial Sequence
  synthesized
ugugcagcuccucccaggcc

SEQ ID NO: 2735 - RNA, 20 nt, Artificial Sequence
  synthesized
uugggccugggaggagcugc

SEQ ID NO: 2736 - RNA, 20 nt, Artificial Sequence
  synthesized
uugggccuggggggagcugc

SEQ ID NO: 2737 - RNA, 20 nt, Artificial Sequence
  synthesized
aaaaaaucugaggauguagg

SEQ ID NO: 2738 - RNA, 20 nt, Artificial Sequence
  synthesized
aaaaaucugaggauguaggu

SEQ ID NO: 2739 - RNA, 20 nt, Artificial Sequence
  synthesized
aaaauaucugaggauguagg

SEQ ID NO: 2740 - RNA, 20 nt, Artificial Sequence
  synthesized
aaaaucugaggauguagguc

SEQ ID NO: 2741 - RNA, 20 nt, Artificial Sequence
  synthesized
aaauaucugaggauguaggu

SEQ ID NO: 2742 - RNA, 20 nt, Artificial Sequence
  synthesized
aaaucugaggauguaggucc

SEQ ID NO: 2743 - RNA, 20 nt, Artificial Sequence
  synthesized
aauaucugaggauguagguc

SEQ ID NO: 2744 - RNA, 20 nt, Artificial Sequence
  synthesized
aaucugaggauguagguccu

SEQ ID NO: 2745 - RNA, 20 nt, Artificial Sequence
  synthesized
accuacauccucagauauuu

SEQ ID NO: 2746 - RNA, 20 nt, Artificial Sequence
  synthesized
aggaccuacauccucagaua

SEQ ID NO: 2747 - RNA, 20 nt, Artificial Sequence
  synthesized
aggaccuacauccucagauu

SEQ ID NO: 2748 - RNA, 20 nt, Artificial Sequence
  synthesized
auaucugaggauguaggucc

SEQ ID NO: 2749 - RNA, 20 nt, Artificial Sequence
  synthesized
cccccuuaaaaaauaucuga

SEQ ID NO: 2750 - RNA, 20 nt, Artificial Sequence
  synthesized
cccucccccuuaaaaaauau

SEQ ID NO: 2751 - RNA, 20 nt, Artificial Sequence
  synthesized
ccucccccuuaaaaaauauc

SEQ ID NO: 2752 - RNA, 20 nt, Artificial Sequence
  synthesized
cguucccccucccccuuaaa

SEQ ID NO: 2753 - RNA, 20 nt, Artificial Sequence
  synthesized
cucccccuuaaaaaauaucu

SEQ ID NO: 2754 - RNA, 20 nt, Artificial Sequence
  synthesized
gaccuacauccucagauauu

SEQ ID NO: 2755 - RNA, 20 nt, Artificial Sequence
  synthesized
ggaccuacauccucagauau

SEQ ID NO: 2756 - RNA, 20 nt, Artificial Sequence
  synthesized
ggaccuacauccucagauuu

SEQ ID NO: 2757 - RNA, 20 nt, Artificial Sequence
  synthesized
uaucugaggauguagguccu

SEQ ID NO: 2758 - RNA, 20 nt, Artificial Sequence
  synthesized
uucccccucccccuuaaaaa

SEQ ID NO: 2759 - RNA, 20 nt, Artificial Sequence
  synthesized
acccuaaggaaaagcacaaa

SEQ ID NO: 2760 - RNA, 20 nt, Artificial Sequence
  synthesized
agacccuaaggaaaagcaca

SEQ ID NO: 2761 - RNA, 20 nt, Artificial Sequence
  synthesized
cagacccuaaggaaaagcac

SEQ ID NO: 2762 - RNA, 20 nt, Artificial Sequence
  synthesized
ccagacccuaaggaaaagca

SEQ ID NO: 2763 - RNA, 20 nt, Artificial Sequence
  synthesized
cccagacccuaaggaaaagc

SEQ ID NO: 2764 - RNA, 20 nt, Artificial Sequence
  synthesized
cccuaaggaaaagcacaaaa

SEQ ID NO: 2765 - RNA, 20 nt, Artificial Sequence
  synthesized
ccuaaggaaaagcacaaaaa

SEQ ID NO: 2766 - RNA, 20 nt, Artificial Sequence
  synthesized
cuccuuagggucugggcccu

SEQ ID NO: 2767 - RNA, 20 nt, Artificial Sequence
  synthesized
gacccuaaggaaaagcacaa

SEQ ID NO: 2768 - RNA, 20 nt, Artificial Sequence
  synthesized
gcccagacccuaaggaaaag

SEQ ID NO: 2769 - RNA, 20 nt, Artificial Sequence
  synthesized
ggcccagacccuaaggaaaa

SEQ ID NO: 2770 - RNA, 20 nt, Artificial Sequence
  synthesized
gggcccagacccuaaggaaa

SEQ ID NO: 2771 - RNA, 20 nt, Artificial Sequence
  synthesized
ucuccuuagggucugggccc

SEQ ID NO: 2772 - RNA, 20 nt, Artificial Sequence
  synthesized
uuccuuagggucugggcccu

SEQ ID NO: 2773 - RNA, 20 nt, Artificial Sequence
  synthesized
uucuccuuagggucugggcc

SEQ ID NO: 2774 - RNA, 20 nt, Artificial Sequence
  synthesized
uuuccuuagggucugggccc

SEQ ID NO: 2775 - RNA, 20 nt, Artificial Sequence
  synthesized
aaguaggaagugagcuugua

SEQ ID NO: 2776 - RNA, 20 nt, Artificial Sequence
  synthesized
aaguaggaagugagcuugug

SEQ ID NO: 2777 - RNA, 20 nt, Artificial Sequence
  synthesized
acuuccauuucuggcacaag

SEQ ID NO: 2778 - RNA, 20 nt, Artificial Sequence
  synthesized
acuuccauuucugguacaag

SEQ ID NO: 2779 - RNA, 20 nt, Artificial Sequence
  synthesized
agacuuccauuucuggcaca

SEQ ID NO: 2780 - RNA, 20 nt, Artificial Sequence
  synthesized
agacuuccauuucugguaca

SEQ ID NO: 2781 - RNA, 20 nt, Artificial Sequence
  synthesized
agcuuguaccagaaauggaa

SEQ ID NO: 2782 - RNA, 20 nt, Artificial Sequence
  synthesized
agcuugugccagaaauggaa

SEQ ID NO: 2783 - RNA, 20 nt, Artificial Sequence
  synthesized
aggaagugagcuugugccag

SEQ ID NO: 2784 - RNA, 20 nt, Artificial Sequence
  synthesized
aguaggaagugagcuuguac

SEQ ID NO: 2785 - RNA, 20 nt, Artificial Sequence
  synthesized
aguaggaagugagcuugugc

SEQ ID NO: 2786 - RNA, 20 nt, Artificial Sequence
  synthesized
auuucuggcacaagcucacu

SEQ ID NO: 2787 - RNA, 20 nt, Artificial Sequence
  synthesized
cacaagcucacuuccuacuu

SEQ ID NO: 2788 - RNA, 20 nt, Artificial Sequence
  synthesized
cagacuuccauuucuggcac

SEQ ID NO: 2789 - RNA, 20 nt, Artificial Sequence
  synthesized
cagacuuccauuucugguac

SEQ ID NO: 2790 - RNA, 20 nt, Artificial Sequence
  synthesized
cauuucuggcacaagcucac

SEQ ID NO: 2791 - RNA, 20 nt, Artificial Sequence
  synthesized
cauuucugguacaagcucac

SEQ ID NO: 2792 - RNA, 20 nt, Artificial Sequence
  synthesized
ccauuucuggcacaagcuca

SEQ ID NO: 2793 - RNA, 20 nt, Artificial Sequence
  synthesized
ccauuucugguacaagcuca

SEQ ID NO: 2794 - RNA, 20 nt, Artificial Sequence
  synthesized
cuggcacaagcucacuuccu

SEQ ID NO: 2795 - RNA, 20 nt, Artificial Sequence
  synthesized
cugguacaagcucacuuccu

SEQ ID NO: 2796 - RNA, 20 nt, Artificial Sequence
  synthesized
cuuccauuucuggcacaagc

SEQ ID NO: 2797 - RNA, 20 nt, Artificial Sequence
  synthesized
cuuccauuucugguacaagc

SEQ ID NO: 2798 - RNA, 20 nt, Artificial Sequence
  synthesized
cuuguaccagaaauggaagu

SEQ ID NO: 2799 - RNA, 20 nt, Artificial Sequence
  synthesized
cuugugccagaaauggaagu

SEQ ID NO: 2800 - RNA, 20 nt, Artificial Sequence
  synthesized
gaagugagcuuguaccagaa

SEQ ID NO: 2801 - RNA, 20 nt, Artificial Sequence
  synthesized
gaagugagcuugugccagaa

SEQ ID NO: 2802 - RNA, 20 nt, Artificial Sequence
  synthesized
gacuuccauuucuggcacaa

SEQ ID NO: 2803 - RNA, 20 nt, Artificial Sequence
  synthesized
gacuuccauuucugguacaa

SEQ ID NO: 2804 - RNA, 20 nt, Artificial Sequence
  synthesized
gagcuuguaccagaaaugga

SEQ ID NO: 2805 - RNA, 20 nt, Artificial Sequence
  synthesized
gagcuugugccagaaaugga

SEQ ID NO: 2806 - RNA, 20 nt, Artificial Sequence
  synthesized
gcacaagcucacuuccuacu

SEQ ID NO: 2807 - RNA, 20 nt, Artificial Sequence
  synthesized
gcagacuuccauuucuggca

SEQ ID NO: 2808 - RNA, 20 nt, Artificial Sequence
  synthesized
gcagacuuccauuucuggua

SEQ ID NO: 2809 - RNA, 20 nt, Artificial Sequence
  synthesized
gccagaaauggaagucugca

SEQ ID NO: 2810 - RNA, 20 nt, Artificial Sequence
  synthesized
gcuuguaccagaaauggaag

SEQ ID NO: 2811 - RNA, 20 nt, Artificial Sequence
  synthesized
gcuugugccagaaauggaag

SEQ ID NO: 2812 - RNA, 20 nt, Artificial Sequence
  synthesized
ggaagugagcuuguaccaga

SEQ ID NO: 2813 - RNA, 20 nt, Artificial Sequence
  synthesized
ggaagugagcuugugccaga

SEQ ID NO: 2814 - RNA, 20 nt, Artificial Sequence
  synthesized
ggcacaagcucacuuccuac

SEQ ID NO: 2815 - RNA, 20 nt, Artificial Sequence
  synthesized
gguacaagcucacuuccuac

SEQ ID NO: 2816 - RNA, 20 nt, Artificial Sequence
  synthesized
guacaagcucacuuccuacu

SEQ ID NO: 2817 - RNA, 20 nt, Artificial Sequence
  synthesized
guaccagaaauggaagucug

SEQ ID NO: 2818 - RNA, 20 nt, Artificial Sequence
  synthesized
gugagcuuguaccagaaaug

SEQ ID NO: 2819 - RNA, 20 nt, Artificial Sequence
  synthesized
gugagcuugugccagaaaug

SEQ ID NO: 2820 - RNA, 20 nt, Artificial Sequence
  synthesized
gugccagaaauggaagucug

SEQ ID NO: 2821 - RNA, 20 nt, Artificial Sequence
  synthesized
uacaagcucacuuccuacuu

SEQ ID NO: 2822 - RNA, 20 nt, Artificial Sequence
  synthesized
uaccagaaauggaagucugc

SEQ ID NO: 2823 - RNA, 20 nt, Artificial Sequence
  synthesized
uaggaagugagcuuguacca

SEQ ID NO: 2824 - RNA, 20 nt, Artificial Sequence
  synthesized
uaggaagugagcuugugcca

SEQ ID NO: 2825 - RNA, 20 nt, Artificial Sequence
  synthesized
uccauuucuggcacaagcuc

SEQ ID NO: 2826 - RNA, 20 nt, Artificial Sequence
  synthesized
uccauuucugguacaagcuc

SEQ ID NO: 2827 - RNA, 20 nt, Artificial Sequence
  synthesized
ucuggcacaagcucacuucc

SEQ ID NO: 2828 - RNA, 20 nt, Artificial Sequence
  synthesized
ucugguacaagcucacuucc

SEQ ID NO: 2829 - RNA, 20 nt, Artificial Sequence
  synthesized
ugagcuuguaccagaaaugg

SEQ ID NO: 2830 - RNA, 20 nt, Artificial Sequence
  synthesized
ugagcuugugccagaaaugg

SEQ ID NO: 2831 - RNA, 20 nt, Artificial Sequence
  synthesized
ugcagacuuccauuucuggc

SEQ ID NO: 2832 - RNA, 20 nt, Artificial Sequence
  synthesized
ugcagacuuccauuucuggu

SEQ ID NO: 2833 - RNA, 20 nt, Artificial Sequence
  synthesized
ugccagaaauggaagucugc

SEQ ID NO: 2834 - RNA, 20 nt, Artificial Sequence
  synthesized
uggcacaagcucacuuccua

SEQ ID NO: 2835 - RNA, 20 nt, Artificial Sequence
  synthesized
ugguacaagcucacuuccua

SEQ ID NO: 2836 - RNA, 20 nt, Artificial Sequence
  synthesized
uguaccagaaauggaagucu

SEQ ID NO: 2837 - RNA, 20 nt, Artificial Sequence
  synthesized
ugugccagaaauggaagucu

SEQ ID NO: 2838 - RNA, 20 nt, Artificial Sequence
  synthesized
uuccauuucuggcacaagcu

SEQ ID NO: 2839 - RNA, 20 nt, Artificial Sequence
  synthesized
uuccauuucugguacaagcu

SEQ ID NO: 2840 - RNA, 20 nt, Artificial Sequence
  synthesized
uucuggcacaagcucacuuc

SEQ ID NO: 2841 - RNA, 20 nt, Artificial Sequence
  synthesized
uucugguacaagcucacuuc

SEQ ID NO: 2842 - RNA, 20 nt, Artificial Sequence
  synthesized
uuucuggcacaagcucacuu

SEQ ID NO: 2843 - RNA, 20 nt, Artificial Sequence
  synthesized
uuucugguacaagcucacuu

SEQ ID NO: 2844 - RNA, 20 nt, Artificial Sequence
  synthesized
aagcuccgccucccggguuc

SEQ ID NO: 2845 - RNA, 20 nt, Artificial Sequence
  synthesized
augccauucuucugccucag

SEQ ID NO: 2846 - RNA, 20 nt, Artificial Sequence
  synthesized
ccgccucccggguucaugcc

SEQ ID NO: 2847 - RNA, 20 nt, Artificial Sequence
  synthesized
gaauggcaugaacccgggag

SEQ ID NO: 2848 - RNA, 20 nt, Artificial Sequence
  synthesized
gaggcugaggcagaagaaug

SEQ ID NO: 2849 - RNA, 20 nt, Artificial Sequence
  synthesized
gcaugaacccgggaggcgga

SEQ ID NO: 2850 - RNA, 20 nt, Artificial Sequence
  synthesized
ucccggguucaugccauucu

SEQ ID NO: 2851 - RNA, 20 nt, Artificial Sequence
  synthesized
ugaggcagaagaauggcaug

SEQ ID NO: 2852 - RNA, 20 nt, Artificial Sequence
  synthesized
aaccaagcuugggcccuuca

SEQ ID NO: 2853 - RNA, 20 nt, Artificial Sequence
  synthesized
aaccaagcuugggcccuucg

SEQ ID NO: 2854 - RNA, 20 nt, Artificial Sequence
  synthesized
aagcuugggcccuucagagc

SEQ ID NO: 2855 - RNA, 20 nt, Artificial Sequence
  synthesized
aagcuugggcccuucggagc

SEQ ID NO: 2856 - RNA, 20 nt, Artificial Sequence
  synthesized
accaagcuugggcccuucag

SEQ ID NO: 2857 - RNA, 20 nt, Artificial Sequence
  synthesized
accaagcuugggcccuucgg

SEQ ID NO: 2858 - RNA, 20 nt, Artificial Sequence
  synthesized
agagcacgaggcccugugug

SEQ ID NO: 2859 - RNA, 20 nt, Artificial Sequence
  synthesized
agggccucgugcuccgaagg

SEQ ID NO: 2860 - RNA, 20 nt, Artificial Sequence
  synthesized
agggccucgugcucugaagg

SEQ ID NO: 2861 - RNA, 20 nt, Artificial Sequence
  synthesized
caagcuugggcccuucagag

SEQ ID NO: 2862 - RNA, 20 nt, Artificial Sequence
  synthesized
caagcuugggcccuucggag

SEQ ID NO: 2863 - RNA, 20 nt, Artificial Sequence
  synthesized
cagagcacgaggcccugugu

SEQ ID NO: 2864 - RNA, 20 nt, Artificial Sequence
  synthesized
cagggccucgugcuccgaag

SEQ ID NO: 2865 - RNA, 20 nt, Artificial Sequence
  synthesized
cagggccucgugcucugaag

SEQ ID NO: 2866 - RNA, 20 nt, Artificial Sequence
  synthesized
ccaagcuugggcccuucaga

SEQ ID NO: 2867 - RNA, 20 nt, Artificial Sequence
  synthesized
ccaagcuugggcccuucgga

SEQ ID NO: 2868 - RNA, 20 nt, Artificial Sequence
  synthesized
ccgaagggcccaagcuuggu

SEQ ID NO: 2869 - RNA, 20 nt, Artificial Sequence
  synthesized
ccucgugcuccgaagggccc

SEQ ID NO: 2870 - RNA, 20 nt, Artificial Sequence
  synthesized
cgaagggcccaagcuugguu

SEQ ID NO: 2871 - RNA, 20 nt, Artificial Sequence
  synthesized
cggagcacgaggcccugugu

SEQ ID NO: 2872 - RNA, 20 nt, Artificial Sequence
  synthesized
cgugcuccgaagggcccaag

SEQ ID NO: 2873 - RNA, 20 nt, Artificial Sequence
  synthesized
cgugcucugaagggcccaag

SEQ ID NO: 2874 - RNA, 20 nt, Artificial Sequence
  synthesized
cuccgaagggcccaagcuug

SEQ ID NO: 2875 - RNA, 20 nt, Artificial Sequence
  synthesized
cucgugcuccgaagggccca

SEQ ID NO: 2876 - RNA, 20 nt, Artificial Sequence
  synthesized
cucugaagggcccaagcuug

SEQ ID NO: 2877 - RNA, 20 nt, Artificial Sequence
  synthesized
cugaagggcccaagcuuggu

SEQ ID NO: 2878 - RNA, 20 nt, Artificial Sequence
  synthesized
gcccuucagagcacgaggcc

SEQ ID NO: 2879 - RNA, 20 nt, Artificial Sequence
  synthesized
gcccuucggagcacgaggcc

SEQ ID NO: 2880 - RNA, 20 nt, Artificial Sequence
  synthesized
gccucgugcuccgaagggcc

SEQ ID NO: 2881 - RNA, 20 nt, Artificial Sequence
  synthesized
gccucgugcucugaagggcc

SEQ ID NO: 2882 - RNA, 20 nt, Artificial Sequence
  synthesized
gcuccgaagggcccaagcuu

SEQ ID NO: 2883 - RNA, 20 nt, Artificial Sequence
  synthesized
gcucugaagggcccaagcuu

SEQ ID NO: 2884 - RNA, 20 nt, Artificial Sequence
  synthesized
gcuugggcccuucggagcac

SEQ ID NO: 2885 - RNA, 20 nt, Artificial Sequence
  synthesized
ggagcacgaggcccugugug

SEQ ID NO: 2886 - RNA, 20 nt, Artificial Sequence
  synthesized
ggcccuucagagcacgaggc

SEQ ID NO: 2887 - RNA, 20 nt, Artificial Sequence
  synthesized
ggcccuucggagcacgaggc

SEQ ID NO: 2888 - RNA, 20 nt, Artificial Sequence
  synthesized
ggccucgugcuccgaagggc

SEQ ID NO: 2889 - RNA, 20 nt, Artificial Sequence
  synthesized
ggccucgugcucugaagggc

SEQ ID NO: 2890 - RNA, 20 nt, Artificial Sequence
  synthesized
gggcccuucagagcacgagg

SEQ ID NO: 2891 - RNA, 20 nt, Artificial Sequence
  synthesized
gggcccuucggagcacgagg

SEQ ID NO: 2892 - RNA, 20 nt, Artificial Sequence
  synthesized
gggccucgugcuccgaaggg

SEQ ID NO: 2893 - RNA, 20 nt, Artificial Sequence
  synthesized
gggccucgugcucugaaggg

SEQ ID NO: 2894 - RNA, 20 nt, Artificial Sequence
  synthesized
gugcuccgaagggcccaagc

SEQ ID NO: 2895 - RNA, 20 nt, Artificial Sequence
  synthesized
gugcucugaagggcccaagc

SEQ ID NO: 2896 - RNA, 20 nt, Artificial Sequence
  synthesized
uccgaagggcccaagcuugg

SEQ ID NO: 2897 - RNA, 20 nt, Artificial Sequence
  synthesized
ucgugcuccgaagggcccaa

SEQ ID NO: 2898 - RNA, 20 nt, Artificial Sequence
  synthesized
ucgugcucugaagggcccaa

SEQ ID NO: 2899 - RNA, 20 nt, Artificial Sequence
  synthesized
ucugaagggcccaagcuugg

SEQ ID NO: 2900 - RNA, 20 nt, Artificial Sequence
  synthesized
ugaagggcccaagcuugguu

SEQ ID NO: 2901 - RNA, 20 nt, Artificial Sequence
  synthesized
ugggcccuucagagcacgag

SEQ ID NO: 2902 - RNA, 20 nt, Artificial Sequence
  synthesized
ugggcccuucggagcacgag

SEQ ID NO: 2903 - RNA, 20 nt, Artificial Sequence
  synthesized
uucagagcacgaggcccugu

SEQ ID NO: 2904 - RNA, 20 nt, Artificial Sequence
  synthesized
uucggagcacgaggcccugu

SEQ ID NO: 2905 - RNA, 20 nt, Artificial Sequence
  synthesized
uugggcccuucagagcacga

SEQ ID NO: 2906 - RNA, 20 nt, Artificial Sequence
  synthesized
uugggcccuucggagcacga

SEQ ID NO: 2907 - RNA, 20 nt, Artificial Sequence
  synthesized
aacuggcccggccgcgccuu

SEQ ID NO: 2908 - RNA, 20 nt, Artificial Sequence
  synthesized
aacuggccuggccgcgccuu

SEQ ID NO: 2909 - RNA, 20 nt, Artificial Sequence
  synthesized
aagagaacuggcccggccgc

SEQ ID NO: 2910 - RNA, 20 nt, Artificial Sequence
  synthesized
aagagaacuggccuggccgc

SEQ ID NO: 2911 - RNA, 20 nt, Artificial Sequence
  synthesized
aaggcgcggccaggccaguu

SEQ ID NO: 2912 - RNA, 20 nt, Artificial Sequence
  synthesized
aaggcgcggccgggccaguu

SEQ ID NO: 2913 - RNA, 20 nt, Artificial Sequence
  synthesized
acuggcccggccgcgccuuc

SEQ ID NO: 2914 - RNA, 20 nt, Artificial Sequence
  synthesized
acuggccuggccgcgccuuc

SEQ ID NO: 2915 - RNA, 20 nt, Artificial Sequence
  synthesized
agaacuggccuggccgcgcc

SEQ ID NO: 2916 - RNA, 20 nt, Artificial Sequence
  synthesized
agaaggcgcggccaggccag

SEQ ID NO: 2917 - RNA, 20 nt, Artificial Sequence
  synthesized
agagaacuggcccggccgcg

SEQ ID NO: 2918 - RNA, 20 nt, Artificial Sequence
  synthesized
agagaacuggccuggccgcg

SEQ ID NO: 2919 - RNA, 20 nt, Artificial Sequence
  synthesized
agcuggagaaggcgcggcca

SEQ ID NO: 2920 - RNA, 20 nt, Artificial Sequence
  synthesized
agcuggagaaggcgcggccg

SEQ ID NO: 2921 - RNA, 20 nt, Artificial Sequence
  synthesized
aggcgcggccaggccaguuc

SEQ ID NO: 2922 - RNA, 20 nt, Artificial Sequence
  synthesized
aggcgcggccgggccaguuc

SEQ ID NO: 2923 - RNA, 20 nt, Artificial Sequence
  synthesized
caagagaacuggcccggccg

SEQ ID NO: 2924 - RNA, 20 nt, Artificial Sequence
  synthesized
caagagaacuggccuggccg

SEQ ID NO: 2925 - RNA, 20 nt, Artificial Sequence
  synthesized
caggccaguucucuugagaa

SEQ ID NO: 2926 - RNA, 20 nt, Artificial Sequence
  synthesized
cccggccgcgccuucuccag

SEQ ID NO: 2927 - RNA, 20 nt, Artificial Sequence
  synthesized
ccuggccgcgccuucuccag

SEQ ID NO: 2928 - RNA, 20 nt, Artificial Sequence
  synthesized
cggccgcgccuucuccagcu

SEQ ID NO: 2929 - RNA, 20 nt, Artificial Sequence
  synthesized
cgggccaguucucuugagaa

SEQ ID NO: 2930 - RNA, 20 nt, Artificial Sequence
  synthesized
cuucucaagagaacuggccu

SEQ ID NO: 2931 - RNA, 20 nt, Artificial Sequence
  synthesized
gaacuggcccggccgcgccu

SEQ ID NO: 2932 - RNA, 20 nt, Artificial Sequence
  synthesized
gaacuggccuggccgcgccu

SEQ ID NO: 2933 - RNA, 20 nt, Artificial Sequence
  synthesized
gaaggcgcggccaggccagu

SEQ ID NO: 2934 - RNA, 20 nt, Artificial Sequence
  synthesized
gaaggcgcggccgggccagu

SEQ ID NO: 2935 - RNA, 20 nt, Artificial Sequence
  synthesized
gagaacuggcccggccgcgc

SEQ ID NO: 2936 - RNA, 20 nt, Artificial Sequence
  synthesized
gagaacuggccuggccgcgc

SEQ ID NO: 2937 - RNA, 20 nt, Artificial Sequence
  synthesized
gagaaggcgcggccaggcca

SEQ ID NO: 2938 - RNA, 20 nt, Artificial Sequence
  synthesized
gagaaggcgcggccgggcca

SEQ ID NO: 2939 - RNA, 20 nt, Artificial Sequence
  synthesized
gccaggccaguucucuugag

SEQ ID NO: 2940 - RNA, 20 nt, Artificial Sequence
  synthesized
gcccggccgcgccuucucca

SEQ ID NO: 2941 - RNA, 20 nt, Artificial Sequence
  synthesized
gccgggccaguucucuugag

SEQ ID NO: 2942 - RNA, 20 nt, Artificial Sequence
  synthesized
gccuggccgcgccuucucca

SEQ ID NO: 2943 - RNA, 20 nt, Artificial Sequence
  synthesized
gcgcggccaggccaguucuc

SEQ ID NO: 2944 - RNA, 20 nt, Artificial Sequence
  synthesized
gcgcggccgggccaguucuc

SEQ ID NO: 2945 - RNA, 20 nt, Artificial Sequence
  synthesized
gcggccaggccaguucucuu

SEQ ID NO: 2946 - RNA, 20 nt, Artificial Sequence
  synthesized
gcggccgggccaguucucuu

SEQ ID NO: 2947 - RNA, 20 nt, Artificial Sequence
  synthesized
gcuggagaaggcgcggccag

SEQ ID NO: 2948 - RNA, 20 nt, Artificial Sequence
  synthesized
gcuggagaaggcgcggccgg

SEQ ID NO: 2949 - RNA, 20 nt, Artificial Sequence
  synthesized
ggagaaggcgcggccaggcc

SEQ ID NO: 2950 - RNA, 20 nt, Artificial Sequence
  synthesized
ggagaaggcgcggccgggcc

SEQ ID NO: 2951 - RNA, 20 nt, Artificial Sequence
  synthesized
ggccaggccaguucucuuga

SEQ ID NO: 2952 - RNA, 20 nt, Artificial Sequence
  synthesized
ggcccggccgcgccuucucc

SEQ ID NO: 2953 - RNA, 20 nt, Artificial Sequence
  synthesized
ggccuggccgcgccuucucc

SEQ ID NO: 2954 - RNA, 20 nt, Artificial Sequence
  synthesized
ggcgcggccaggccaguucu

SEQ ID NO: 2955 - RNA, 20 nt, Artificial Sequence
  synthesized
ggcgcggccgggccaguucu

SEQ ID NO: 2956 - RNA, 20 nt, Artificial Sequence
  synthesized
ucaagagaacuggcccggcc

SEQ ID NO: 2957 - RNA, 20 nt, Artificial Sequence
  synthesized
ucaagagaacuggccuggcc

SEQ ID NO: 2958 - RNA, 20 nt, Artificial Sequence
  synthesized
uggagaaggcgcggccaggc

SEQ ID NO: 2959 - RNA, 20 nt, Artificial Sequence
  synthesized
uggagaaggcgcggccgggc

SEQ ID NO: 2960 - RNA, 20 nt, Artificial Sequence
  synthesized
uggcccggccgcgccuucuc

SEQ ID NO: 2961 - RNA, 20 nt, Artificial Sequence
  synthesized
uggccgcgccuucuccagcu

SEQ ID NO: 2962 - RNA, 20 nt, Artificial Sequence
  synthesized
uggccuggccgcgccuucuc

SEQ ID NO: 2963 - RNA, 20 nt, Artificial Sequence
  synthesized
uucucaagagaacuggcccg

SEQ ID NO: 2964 - RNA, 20 nt, Artificial Sequence
  synthesized
uucucaagagaacuggccug

SEQ ID NO: 2965 - RNA, 20 nt, Artificial Sequence
  synthesized
accuccccgucuugucccca

SEQ ID NO: 2966 - RNA, 20 nt, Artificial Sequence
  synthesized
ccaccgggcugcgugagugu

SEQ ID NO: 2967 - RNA, 20 nt, Artificial Sequence
  synthesized
ccccaucacacucacgcagc

SEQ ID NO: 2968 - RNA, 20 nt, Artificial Sequence
  synthesized
ccccgucacacucacgcagc

SEQ ID NO: 2969 - RNA, 20 nt, Artificial Sequence
  synthesized
ccccgucuuguccccaucac

SEQ ID NO: 2970 - RNA, 20 nt, Artificial Sequence
  synthesized
cccgucuuguccccaucaca

SEQ ID NO: 2971 - RNA, 20 nt, Artificial Sequence
  synthesized
ccuccccgucuuguccccau

SEQ ID NO: 2972 - RNA, 20 nt, Artificial Sequence
  synthesized
cgucacacucacgcagcccg

SEQ ID NO: 2973 - RNA, 20 nt, Artificial Sequence
  synthesized
cgucuuguccccaucacacu

SEQ ID NO: 2974 - RNA, 20 nt, Artificial Sequence
  synthesized
cgugagugugauggggacaa

SEQ ID NO: 2975 - RNA, 20 nt, Artificial Sequence
  synthesized
cugcgugagugugaugggga

SEQ ID NO: 2976 - RNA, 20 nt, Artificial Sequence
  synthesized
cuuguccccaucacacucac

SEQ ID NO: 2977 - RNA, 20 nt, Artificial Sequence
  synthesized
gauggggacaagacggggag

SEQ ID NO: 2978 - RNA, 20 nt, Artificial Sequence
  synthesized
gcugcgugagugugacgggg

SEQ ID NO: 2979 - RNA, 20 nt, Artificial Sequence
  synthesized
gcugcgugagugugaugggg

SEQ ID NO: 2980 - RNA, 20 nt, Artificial Sequence
  synthesized
ggcugcgugagugugauggg

SEQ ID NO: 2981 - RNA, 20 nt, Artificial Sequence
  synthesized
guccccgucacacucacgca

SEQ ID NO: 2982 - RNA, 20 nt, Artificial Sequence
  synthesized
gucuuguccccaucacacuc

SEQ ID NO: 2983 - RNA, 20 nt, Artificial Sequence
  synthesized
gugagugugauggggacaag

SEQ ID NO: 2984 - RNA, 20 nt, Artificial Sequence
  synthesized
uccccgucacacucacgcag

SEQ ID NO: 2985 - RNA, 20 nt, Artificial Sequence
  synthesized
uccccgucuuguccccauca

SEQ ID NO: 2986 - RNA, 20 nt, Artificial Sequence
  synthesized
ugcgugagugugauggggac

SEQ ID NO: 2987 - RNA, 20 nt, Artificial Sequence
  synthesized
uguccccaucacacucacgc

SEQ ID NO: 2988 - RNA, 20 nt, Artificial Sequence
  synthesized
uguccccgucacacucacgc

SEQ ID NO: 2989 - RNA, 20 nt, Artificial Sequence
  synthesized
ugugauggggacaagacggg

SEQ ID NO: 2990 - RNA, 20 nt, Artificial Sequence
  synthesized
uuguccccaucacacucacg

SEQ ID NO: 2991 - RNA, 20 nt, Artificial Sequence
  synthesized
uuguccccgucacacucacg

SEQ ID NO: 2992 - RNA, 20 nt, Artificial Sequence
  synthesized
aauaccacggcacauggccu

SEQ ID NO: 2993 - RNA, 20 nt, Artificial Sequence
  synthesized
aauaccauggcacauggccu

SEQ ID NO: 2994 - RNA, 20 nt, Artificial Sequence
  synthesized
accacggcacauggccuggu

SEQ ID NO: 2995 - RNA, 20 nt, Artificial Sequence
  synthesized
accaggccaugugccauggu

SEQ ID NO: 2996 - RNA, 20 nt, Artificial Sequence
  synthesized
accaggccaugugccguggu

SEQ ID NO: 2997 - RNA, 20 nt, Artificial Sequence
  synthesized
accauggcacauggccuggu

SEQ ID NO: 2998 - RNA, 20 nt, Artificial Sequence
  synthesized
acccaaauaccacggcacau

SEQ ID NO: 2999 - RNA, 20 nt, Artificial Sequence
  synthesized
acccaaauaccauggcacau

SEQ ID NO: 3000 - RNA, 20 nt, Artificial Sequence
  synthesized
acccucccaggacccaaaua

SEQ ID NO: 3001 - RNA, 20 nt, Artificial Sequence
  synthesized
acggcacauggccugguauc

SEQ ID NO: 3002 - RNA, 20 nt, Artificial Sequence
  synthesized
auggcacauggccugguauc

SEQ ID NO: 3003 - RNA, 20 nt, Artificial Sequence
  synthesized
augugccaugguauuugggu

SEQ ID NO: 3004 - RNA, 20 nt, Artificial Sequence
  synthesized
augugccgugguauuugggu

SEQ ID NO: 3005 - RNA, 20 nt, Artificial Sequence
  synthesized
caaauaccacggcacauggc

SEQ ID NO: 3006 - RNA, 20 nt, Artificial Sequence
  synthesized
caaauaccauggcacauggc

SEQ ID NO: 3007 - RNA, 20 nt, Artificial Sequence
  synthesized
cacggcacauggccugguau

SEQ ID NO: 3008 - RNA, 20 nt, Artificial Sequence
  synthesized
caggacccaaauaccacggc

SEQ ID NO: 3009 - RNA, 20 nt, Artificial Sequence
  synthesized
caggacccaaauaccauggc

SEQ ID NO: 3010 - RNA, 20 nt, Artificial Sequence
  synthesized
cauggcacauggccugguau

1-42. (canceled)

43. An isolated guide RNA comprising a nucleic acid sequence consisting of 17-24 nucleotides and containing the sequence of SEQ ID NO: 237, 238, 241, 242, 247, or 248, wherein the guide RNA is:
a) a single guide RNA (sgRNA); or b) a CRISPR RNA (crRNA) and a transactivating RNA (tracrRNA).

44. A method for inactivating a mutant Guanylate Cyclase 2D (GUCY2D) allele in a human cell, the method comprising delivering to the cell a composition comprising
a) the isolated guide RNA of claim 1; and
b) a CRISPR nuclease,
wherein the human cell comprises a mutant GUCY2D allele and a functional GUCY2D allele,
wherein the sequence of the rs61749665 SNP position in the mutant GUCY2D allele differs from the sequence of the rs61749665 SNP position in the functional GUCY2D allele,
wherein the guide RNA targets the CRIPSR nuclease to the rs61749665 SNP position of the mutant GUCY2D allele to create a DNA break in the mutant GUCY2D allele,
thereby inactivating the mutant GUCY2D allele and maintaining the functional GUCY2D allele intact.

45. The method of claim 44, further comprising subjecting the mutant GUCY2D allele to an insertion or deletion by an error prone non-homologous end joining (NHEJ) mechanism to generate a frameshift in the mutant GUCY2D allele sequence.

46. The method of claim 45, wherein the frameshift creates an early stop codon in the mutant GUCY2D allele.

47. The method of claim 45, wherein the frameshift results in nonsense-mediated mRNA decay of a transcript of the mutant GUCY2D allele.

48. The method of claim 44, wherein the inactivating results in a truncated protein encoded by the mutated GUCY2D allele and a functional protein encoded by the functional GUCY2D allele.

49. An isolated guide RNA comprising a nucleic acid sequence consisting of 17-24 nucleotides and containing the sequence of SEQ ID NO: 402, 403, 413, 414, 417, or 418, wherein the guide RNA is:
a) a single guide RNA (sgRNA); or
b) a CRISPR RNA (crRNA) and transactivating RNA (tracrRNA).

50. A method for inactivating a mutant Guanylate Cyclase 2D (GUCY2D) allele in a human cell, the method comprising delivering to the cell a composition comprising
a) the isolated guide RNA of claim 49; and
b) a CRISPR nuclease,
wherein the human cell comprises a mutant GUCY2D allele and a functional GUCY2D allele,
wherein the sequence of the rs3829789 SNP position in the mutant GUCY2D allele differs from the sequence of the rs3829789 SNP position in the functional GUCY2D allele,
wherein the guide RNA target the CRIPSR nuclease to the rs3829789 SNP position of the mutant GUCY2D allele to create a DNA break in the mutant GUCY2D allele,
thereby inactivating the mutant GUCY2D allele and maintaining the functional GUCY2D allele intact.

51. The method of claim 50, further comprising subjecting the mutant GUCY2D allele to an insertion or deletion by an error prone non-homologous end joining (NHEJ) mechanism to generate a frameshift in the mutant GUCY2D allele sequence.

52. The method of claim 51, wherein the frameshift creates an early stop codon in the mutant GUCY2D allele.

53. The method of claim 51, wherein the frameshift results in nonsense-mediated mRNA decay of a transcript of the mutant GUCY2D allele.

54. The method of claim 50, wherein the inactivating results in a truncated protein encoded by the mutated GUCY2D allele and a functional protein encoded by the functional GUCY2D allele.

55. An isolated guide RNA comprising a nucleic acid sequence consisting of 17-24 nucleotides and containing the sequence of SEQ ID NO: 293, 294, 307, or 3011, wherein the guide RNA is:
a) a single guide RNA (sgRNA); or
b) a CRISPR RNA (crRNA) and transactivating RNA (tracrRNA).

56. A method for inactivating a mutant Guanylate Cyclase 2D (GUCY2D) allele in a human cell, the method comprising delivering to the cell a composition comprising
a) the isolated guide RNA of claim 49; and
b) a CRISPR nuclease,
wherein the human cell comprises a mutant GUCY2D allele and a functional GUCY2D allele,
wherein the sequence of the rs8069344 SNP position in the mutant GUCY2D allele differs from the sequence of the rs8069344 SNP position in the functional GUCY2D allele,
wherein the guide RNA target the CRIPSR nuclease to the rs8069344 SNP position of the mutant GUCY2D allele to create a DNA break in the mutant GUCY2D allele,
thereby inactivating the mutant GUCY2D allele and maintaining the functional GUCY2D allele intact.

57. The method of claim 56, further comprising subjecting the mutant GUCY2D allele to an insertion or deletion by an error prone non-homologous end joining (NHEJ) mechanism to generate a frameshift in the mutant GUCY2D allele sequence.

58. The method of claim 57, wherein the frameshift creates an early stop codon in the mutant GUCY2D allele.

59. The method of claim 57, wherein the frameshift results in nonsense-mediated mRNA decay of a transcript of the mutant GUCY2D allele.

60. The method of claim 56, wherein the inactivating results in a truncated protein encoded by the mutated GUCY2D allele and a functional protein encoded by the functional GUCY2D allele.
